(19) United States
(12) Patent Application Publication
(10) Pub. No.: US 2023/0203490 A1
(43) Pub. Date: Jun. 29, 2023

(54) UTILIZING RNA INTERFERENCE AGAINST SARS-COV-2

(71) Applicant: ELEVEN THERAPEUTICS LTD., Tel Aviv (IL)

(72) Inventor: Yaniv ERLICH, Raanana (IL)

(21) Appl. No.: 17/923,586

(22) PCT Filed: May 5, 2021
(86) PCT No.: PCT/IL2021/050511

§ 371 Date: Nov. 6, 2022

Related U.S. Application Data
(60) Provisional application No. 63/138,843, filed on Jan. 19, 2021.
(60) Provisional application No. 63/021,399, filed on May 7, 2020.

(51) Int. Cl. C12N 15/113; A61P 31/14; A61P 11/00

(52) U.S. Cl. CPC C12N 15/1131; A61P 31/14; A61P 11/00; C12N 2310/14

(57) ABSTRACT

An RNAi molecule, the RNAi molecule, vector and composition including the RNAi molecule and method of using same, wherein the RNAi molecule includes a dsRNA sequence of from about 15 to about 60 base pairs, capable of decreasing expression of a SARS-CoV-2 gene.

### BACKGROUND

[0001] Covid-19 has been one of the world's worst pandemic in modern times. As of early April 2020, over 1.6 million people have been affected and more than 100,000 individuals have succumbed to the disease. Beyond the human toll, the pandemic also created a massive economic turmoil due to unprecedented steps took by Governments to control the disease. Recent epidemiological modeling² suggests that the SARS-CoV-2 pandemic will undergo multiple waves of infections worldwide over the next years. These waves are likely to continue until a level of herd immunity greater than 60% is achieved (through both natural infection and vaccination). Even then, the virus will not be eliminated and will exhibit a typical seasonal pattern with local effects.

[0002] siRNA are short, double stranded RNA molecules between 18 to 25nt. When entering into cells, these molecules are loaded into the RNA interference (RNAi) machinery, which endogenously exist in human cells. The RNAi machinery scavenges the cytoplasm for long RNA molecules that specifically exhibit sequence complementarity to the loaded siRNA sequences. When it identifies a target RNA molecule with such complementarity, it silences its expression and prevents protein translation. shRNAs are quite similar but instead of administrating double stranded RNA, these molecules are typically administered as part of a genetic engineering step where they are introduced into the host genome, for example by lentivirus infection. The shRNA behaves as a new gene in the genome that is transcribed by the host RNA machinery into a single piece of RNA molecule. The shRNA is folded into a hairpin structure and recognized by a series of endogenous enzymes that cut the structure until a short double stranded RNA is created. One strand of the double stranded RNA is loaded into the RNAi machinery and can repress long reverse complement RNA molecules.

### SUMMARY OF THE INVENTION

[0003] There is provided herein siRNAs and/or shRNA (commonly referred to herein as RNAi molecules), compositions comprising the RNAi molecules and methods for utilizing same for preventing infection, reducing spread and/or reducing viral load in a subject in need thereof.

[0004] Advantageously, the hereindisclosed RNAi molecules are highly potent and thus retain high efficacy even at small doses, thereby reducing the cost of the final therapeutic product as well as minimizing risk off cross-reactivity against transcripts derived from the host genome. According to some embodiments, the composition may include a “cocktail” of RNAi molecules. This may enable high optionally improved efficacy. According to some embodiments, each of the RNAi molecules of the cocktail may be provided at a lower dose than that required if provided as a single molecule, thereby further increasing the safety of the therapeutic product.

[0005] As a further advantage, the hereindisclosed RNAi molecules are conserved among a wide range of SARS-CoV2 strains thus providing broad-range efficacy.

[0006] According to some embodiments, the herein provided compositions may have an essentially on the spot efficacy (e.g. within an hour or even half an hour after administration. This may advantageously enable the use of the composition for first line protection. As a non-limiting example, a paramedic receiving a call to a patient showing Covid-19 symptoms may take the composition prior to arrival so as to minimize risk of being infected by the patient. As another non-limiting example, medical workers or other care-givers may be administered with the composition prior to enter covid-19 infected facilities. Advantageously, the hereindisclosed RNAi molecules are stable e.g. for approximately 12 hours, thus providing protection during approximately the same amount of time. Subsequently the RNAi molecules are self-degraded thus having no or few long-term implications for the subject administered therewith.

[0007] According to some embodiments, there is provided an isolated ribonucleic acid interfering (RNAi) molecule, comprising a dsRNA sequence of from about 15 to about 60 base pairs, capable of decreasing expression of a SARS-CoV-2 gene, wherein a guide strand of the dsRNA comprises at least one nucleotide sequence having at least 80% sequence homology to any one of SEQ ID NO: 1-14425.

[0008] According to some embodiments, there is provided an isolated ribonucleic acid interfering (RNAi) molecule, comprising a dsRNA sequence of from about 15 to about 60 base pairs, capable of decreasing expression of a SARS-CoV-2 gene, wherein a guide strand of the dsRNA comprises at least one nucleotide sequence having at least 80% sequence homology to any one of SEQ ID NO: 1-99.

[0009] According to some embodiments, there is provided an isolated ribonucleic acid interfering (RNAi) molecule, comprising a dsRNA sequence of from about 15 to about 60 base pairs, capable of decreasing expression of the NSP8 gene of SARS-CoV-2, wherein a guide strand of the dsRNA comprises at a nucleotide sequence having at least 80% sequence homology to any one of SEQ ID NO: 3-10.

[0010] According to some embodiments, there is provided an isolated ribonucleic acid interfering (RNAi) molecule, comprising a dsRNA sequence of from about 15 to about 60 base pairs, capable of decreasing expression of the NSP8 gene of SARS-CoV-2, wherein a guide strand of the dsRNA comprises at a nucleotide sequence having at least 80% sequence homology to any one of SEQ ID NO: 4 and 6-9.

[0011] According to some embodiments, there is provided an isolated ribonucleic acid interfering (RNAi) molecule, comprising a dsRNA sequence of from about 15 to about 60 base pairs, capable of decreasing expression of the helicase gene of SARS-CoV-2, wherein a guide strand of the dsRNA comprises at a nucleotide sequence having at least 80% sequence homology to any one of SEQ ID NO: 11-29 and 82.

[0012] According to some embodiments, there is provided an isolated ribonucleic acid interfering (RNAi) molecule, comprising a dsRNA sequence of from about 15 to about 60 base pairs, capable of decreasing expression of the helicase gene of SARS-CoV-2, wherein a guide strand of the dsRNA comprises at a nucleotide sequence having at least 80% sequence homology to any one of SEQ ID NO: 12-13 and 99. According to some embodiments, there is provided an isolated ribonucleic acid interfering (RNAi) molecule, comprising a dsRNA sequence of from about 15 to about 60 base pairs, capable of decreasing expression of the helicase gene of SARS-CoV-2, wherein a guide strand of the dsRNA comprises at a nucleotide sequence having at least 80% sequence homology to SEQ ID NO: 13.

[0013] According to some embodiments, there is provided an isolated ribonucleic acid interfering (RNAi) molecule, comprising a dsRNA sequence of from about 15 to about 60 base pairs, capable of decreasing expression of the RNA dependent RNA polymerase gene of SARS-CoV-2, wherein a guide strand of the dsRNA comprises at a nucleotide sequence having at least 80% sequence homology to any one of SEQ ID NO: 30-46, 80 and 81.

[0014] According to some embodiments, there is provided an isolated ribonucleic acid interfering (RNAi) molecule, comprising a dsRNA sequence of from about 15 to about 60 base pairs, capable of decreasing expression of the RNA dependent RNA polymerase gene of SARS-CoV-2, wherein a guide strand of the dsRNA comprises at a nucleotide sequence having at least 80% sequence homology to any one of SEQ ID NO: 33-35 and 46.

[0015] According to some embodiments, there is provided an isolated ribonucleic acid interfering (RNAi) molecule, comprising a dsRNA sequence of from about 15 to about 60 base pairs, capable of decreasing expression of the Spike gene of SARS-CoV-2, wherein a guide strand of the dsRNA comprises at a nucleotide sequence having at least 80% sequence homology to any one of SEQ ID NO: 47-71 and 83-88.

[0016] According to some embodiments, there is provided an isolated ribonucleic acid interfering (RNAi) molecule, comprising a dsRNA sequence of from about 15 to about 60 base pairs, capable of decreasing expression of the Spike gene of SARS-CoV-2, wherein a guide strand of the dsRNA comprises at a nucleotide sequence having at least 80% sequence homology to any one of SEQ ID NO: 53, 54, 60, 62, 66, 68, 69, 83 and 84.

[0017] According to some embodiments, there is provided an isolated ribonucleic acid interfering (RNAi) molecule, comprising a dsRNA sequence of from about 15 to about 60 base pairs, capable of targeting the reverse complement of the leader of SARS-CoV-2, wherein a guide strand of the dsRNA comprises at a nucleotide sequence having at least 80% sequence homology to any one of SEQ ID NO: 72-78.

[0018] According to some embodiments, there is provided an isolated ribonucleic acid interfering (RNAi) molecule, comprising a dsRNA sequence of from about 15 to about 60 base pairs, capable of targeting the reverse complement of the leader of SARS-CoV-2, wherein a guide strand of the dsRNA comprises at a nucleotide sequence having at least 80% sequence homology to any one of SEQ ID NO: 76-78.

[0019] According to some embodiments, the first strand and the second strand of the dsRNA include at least 14-25 contiguous complementary base pairs.

[0020] According to some embodiments, the first and/or the second strands comprise a 3′ single-stranded overhang. According to some embodiments, the overhang comprises at least two nucleotides. According to some embodiments, the dsRNA comprises a nucleotide analogue.

[0021] According to some embodiments, the at least one nucleotide sequence has 100% sequence homology to any one of SEQ ID NO: 1-14425.

[0022] According to some embodiments, the at least one nucleotide sequence has 100% sequence homology to any one of SEQ ID NO 1-99.

[0023] According to some embodiments, the RNAi molecule is a siRNA. According to some embodiments, the RNAi molecule is a shRNA.

[0024] According to some embodiments, there is provided an RNAi-inducing vector comprising a nucleotide sequence encoding at least one RNAi molecule and a promoter transcriptionally associated with the nucleotide sequence, the RNAi molecule comprising a dsRNA sequence of from about 15 to about 60 base pairs, capable of decreasing expression of a SARS-CoV-2 gene, wherein the RNAi molecule comprises at least one nucleotide sequence having at least 80% sequence homology to any one of SEQ ID NOs: 1-80 and 89-99, or SEQ ID Nos: 3-10; or 4 and 6-9; or SEQ ID Nos: 11-29 and 82; or SEQ ID Nos: 12-13; or SEQ ID Nos: 30-46, 80 and 81; or SEQ ID Nos: 33-35 and 46; or SEQ ID Nos: 47-71 and 83-88; or SEQ ID Nos: 53, 54, 60, 62, 66, 68, 69, 83 and 84; or SEQ ID Nos: 72-78; or SEQ ID Nos: 76-78; or SEQ ID Nos 89-99, SEQ ID Nos 9353, 9452, 9549, and 14426-14428. Each possibility is a separate embodiment.

[0025] According to some embodiments, the first strand and the second strand of the dsRNA comprises at least 14-25 contiguous complementary base pairs According to some embodiments, wherein the dsRNA comprises a nucleotide analogue.

[0026] According to some embodiments, the promoter is a constitutively active promoter, an inducible promoter and/or tissue specific promoter.

[0027] According to some embodiments, the transcription vector is any one of an adeno-viral vector or a lentiviral vector.

[0028] According to some embodiments, there is provided a composition comprising the one or more of the hereindisclosed RNAi molecules or a hereindisclosed vector including the RNAi molecule, and a suitable transport vehicle and/or carrier.

[0029] According to some embodiments, the composition comprises at least two different RNAi molecules, wherein the first strand of each of the at least two RNAi molecules has 80% sequence homology to different ones of any one of SEQ ID NOs: 1-80 and 89-99, or SEQ ID Nos: 3-10; or 4 and 6-9; or SEQ ID Nos: 11-29 and 82; or SEQ ID Nos: 12-13; or SEQ ID Nos: 30-46, 80 and 81; or SEQ ID Nos: 33-35 and 46; or SEQ ID Nos: 47-71 and 83-88; or SEQ ID Nos: 53, 54, 60, 62, 66, 68, 69, 83 and 84; or SEQ ID Nos: 72-78; or SEQ ID Nos: 76-78; or SEQ ID Nos 89-99. Each possibility is a separate embodiment.

[0030] According to some embodiments, the carrier is aqueous solution.

[0031] According to some embodiments, the composition is suitable for administration through aerosol.

[0032] According to some embodiments, the transport vehicle is a liposome or a lipid nanoparticle.

[0033] According to some embodiments, the composition is formulated for oral and/or nasal administration. According to some embodiments, the composition is formulated for administration via inhalation. According to some embodiments, the composition is formulated for intranasal and/or intrabuccal administration.

[0034] According to some embodiments, there is provided a method for preventing infection, reducing viral load, attenuating and/or inhibiting spread of SARS-CoV-2 infection, the method comprising administering to a subject the hereindisclosed RNAi molecule or the hereindisclosed composition comprising the RNAi molecule.

[0035] According to some embodiments, the subject is a subject infected with the SARS-CoV-2. According to some embodiments, the subject is a care-giver of a patient infected with the SARS-CoV-2 or suspected as being infected with SARS-CoV-2. According to some embodiments, the subject is an individual having high risk of severe illness if infected with SARS-CoV-2. According to some embodiments, the subject is an intermediate host.

[0036] According to some embodiments, the method comprises administering 150 mg siRNA/day.

[0037] According to some embodiments, there is provided any of the herein disclosed RNAi molecules or composition comprising same for use in preventing infection, reducing viral load, attenuating and/or inhibiting spread of SARS-CoV-2 infection.

[0038] Certain embodiments of the present disclosure may include some, all, or none of the above advantages. One or more technical advantages may be readily apparent to those skilled in the art from the figures, descriptions and claims included herein. Moreover, while specific advantages have been enumerated above, various embodiments may include all, some or none of the enumerated advantages.

[0039] In addition to the exemplary aspects and embodiments described above, further aspects and embodiments will become apparent by reference to the figures and by study of the following detailed descriptions.

### BRIEF DESCRIPTION OF THE FIGURES

[0040] The invention will now be described in relation to certain examples and embodiments with reference to the following illustrative figures so that it may be more fully understood.

[0041] FIG. 1 is a flowchart of a method for identifying potential RNAi molecules; according to some embodiments.

[0042] FIG. 2 is a flowchart of a method for identifying potential RNAi molecules; according to some embodiments.

[0043] FIG. 3 is a flowchart of a method for identifying potential RNAi molecules; according to some embodiments.

[0044] FIG. 4 shows representative FACS results and gating strategy.

[0045] FIG. 5A-FIG. 5C show representative FACS results of cells transfected with a control siRNA (negative control), target siRNA and siRNA against GFP (positive control), respectively.

[0046] FIG. 6A and FIG. 6B show the mCherry+GFP/GFP+ ratio (indicative of siRNAs efficiency), obtained for siRNAs targeting the helicase of SARS-COV2, utilizing 1 nM, 500 pM and 80 pM siRNA.

[0047] FIG. 7A and FIG. 7B show the mCherry+GFP/GFP+ ratio (indicative of siRNAs efficiency), obtained for various siRNAs targeting the transcript of NSP8 of SARS-COV2, utilizing 1nM, 500 pM and 80 pM siRNA.

[0048] FIG. 8A and FIG. 8B show the mCherry+GFP/GFP+ ratio (indicative of siRNAs efficiency), obtained for various siRNAs targeting the transcript of RNA dependent RNA polymerase of SARS-COV2, utilizing 1 nM, 500 pM and 80 pM siRNA.

[0049] FIG. 9A and FIG. 9B and 10 show the mCherry+GFP/GFP+ ratio (indicative of siRNAs efficiency), obtained for various siRNAs targeting the transcript of the S-protein of SARS-COV2, utilizing 1 nM, 500 pM and 80 pM siRNA.

[0050] FIG. 11A and FIG. 11B show the mCherry+GFP/GFP+ ratio (indicative of siRNAs efficiency), obtained for various siRNAs targeting the Reverse Complement of the transcript of leader protein of SARS-COV2, utilizing 1 nM, 500 pM and 80 pM siRNA.

[0051] FIG. 12A and FIG. 12B, show the IC50 of fluorescence of a siRNAs targeting NSP8 of SARS-COV2 at different concentrations of the siRNAs.

[0052] FIG. 13A and FIG. 13B, show the IC50 of fluorescence of various siRNAs targeting the various regions of SARS-COV2 genome, at different concentrations of siRNAs.

[0053] FIG. 14, shows live virus attenuation results obtained for siRNAs targeting the transcript of the spike of Sars-COV2 after challenging Vero E6 cells with 600 TCID 50 of SARS-CoV-2. The level of viral load was obtained via qPCR by a Allplex™ SARS-CoV-2 Assay manufactured by Seegene. The Orflab expression levels are denoted as “genomic region” and the average expression of the “E” and the “N” gene are denoted as “subgenomic region”. The level of 100% corresponds to the viral load detected in a control condition transfected with siRNA against eGFP.

[0054] FIG. 15 shows live virus attenuation results obtained for siRNAs targeting the transcript of NSP8 (SEQ ID NO: 7), RNA dependent RNA polymerase (SEQ ID NO: 48) alone and in a combination.

[0055] FIG. 16A and FIG. 16B, viral load after treatment of cells, infected with SARS-COV2, with various siRNAs recovered in the screen.

[0056] FIG. 17A and FIG. 17B, viral load after treatment of cells, infected with 6000 TCID50 of SARS-COV2, with various siRNA cocktails.

[0057] FIG. 17C and FIG. 17D, viral load after treatment of cells, infected with 600 TCID50 of SARS-COV2, with various siRNA cocktails.

[0058] FIG. 17E and FIG. 17F, viral load after treatment of cells, infected with 60 TCID50 of SARS-COV2, with various siRNA cocktails.

### DETAILED DESCRIPTION

[0059] In the following description, various aspects of the disclosure will be described. For the purpose of explanation, specific configurations and details are set forth in order to provide a thorough understanding of the different aspects of the disclosure. However, it will also be apparent to one skilled in the art that the disclosure may be practiced without specific details being presented herein. Furthermore, well-known features may be omitted or simplified in order not to obscure the disclosure.

[0060] For convenience, certain terms used in the specification, examples, and appended claims are collected here. Unless otherwise defined, all technical and scientific terms used herein have the same meaning as commonly understood by one of ordinary skill in the art to which this invention pertains.

[0061] As used herein, a “nucleotide” comprises a nitrogenous base, a sugar molecule, and a phosphate group. A nucleic acid may include naturally occurring nucleosides (e.g., adenosine, thymidine, guanosine, cytidine, uridine, deoxyadenosine, deoxythymidine, deoxyguanosine, and deoxycytidine), nucleoside analogs (e.g., 2-aminoadenosine, 2-thiothymidine, inosine, pyrrolo-pyrimidine, 3-methyl adenosine, C5-propynylcytidine, C5-propynyluridine, C5-bromouridine, C5-fluorouridine, C5-iodouridine, C5-methylcytidine, 7-deazaadenosine, 7-deazaguanosine, 8-oxoadenosine, 8-oxoguanosine, O(6)-methylguanine, and 2-thiocytidine), chemically modified bases, biologically modified bases (e.g., methylated bases), intercalated bases, modified sugars (e.g., 2′-fluororibose, ribose, 2′-deoxyribose, locked nucleic acids, arabinose, and hexose). According to some embodiments, the sugar and/or phosphate groups may be modified to include a peptide bond, so as to obtain a Peptide Nucleotide Acid (PNA).

[0062] As used herein, the term “RNA” or “RNA molecule” or “ribonucleic acid molecule” refers to a polymer of ribonucleotides. The term “DNA” or “DNA molecule” or deoxyribonucleic acid molecule” refers to a polymer of deoxyribonucleotides. DNA and RNA can be synthesized naturally (e.g. by DNA replication or transcription of DNA or RNA, respectively). DNA and RNA can also be chemically synthesized. RNA can be post-transcriptionally modified. The terms “target mRNA” and “target transcript” are synonymous as used herein.

[0063] As used herein, the term “RNA interference” (“RNAi”) refers to selective intracellular degradation of RNA (also referred to as gene silencing). As used herein a RNAi molecule may collectively refer to small interfering RNAs and short hairpin RNA.

[0064] As used herein, the term “small interfering RNA” (“siRNA”), also referred to in the art as “short interfering RNAs,” refers to an RNA (or RNA analog) comprising between about 10-60 or 15-25 nucleotides (or nucleotide analogs) that is capable of directing or mediating RNA interference. Generally, as used herein the term “siRNA” refers to double stranded siRNA (as compared to single stranded or antisense RNA). In certain embodiments, the 3′ end of the RNAi molecules may include additional nucleotides that create an overhang, such as “TT”.

[0065] As used herein, the term “short hairpin RNA” (“shRNA”) refers to an siRNA (or siRNA analog) precursor that is folded into a hairpin structure and contains a single stranded portion of at least one nucleotide (a “loop”), e.g., an RNA molecule that contains at least two complementary portions hybridized or capable of hybridizing to form a double-stranded (duplex) structure sufficiently long to mediate RNAi (as described for siRNA duplexes), and at least one single-stranded portion, typically between approximately 1 and 10 nucleotides in length that forms a loop connecting the regions of the shRNA that form the duplex portion. The duplex portion may, but typically does not, contain one or more mismatches and/or one or more bulges consisting of one or more unpaired nucleotides in either or both strands. Without wishing to be bound by theory, shRNAs are thought to be processed into siRNAs by the conserved cellular RNAi machinery. shRNAs are capable of inhibiting expression of a target transcript that is complementary to a portion of the shRNA (referred to as the antisense or guide strand of the shRNA). In general, the features of the duplex formed between the guide strand of the shRNA and a target transcript are similar to those of the duplex formed between the guide strand of an siRNA and a target transcript. In certain embodiments of the invention the 5′ end of an shRNA has a phosphate group while in other embodiments it does not. In certain embodiments of the invention the 3′ end of an shRNA has a hydroxyl group.

[0066] As used herein, the term “RNAi-inducing vector” includes a vector whose presence within a cell results in transcription of one or more RNAs that self-hybridize or hybridize to each other to form an RNAi molecule. In various embodiments of the invention this term encompasses plasmids, e.g., DNA vectors (whose sequence may comprise sequence elements derived from a virus), or viruses, (other than naturally occurring viruses or plasmids that have not been modified by the hand of man), whose presence within a cell results in production of one or more RNAs that self-hybridize or hybridize to each other to form an RNAi molecule. In general, the vector comprises a nucleic acid operably linked to expression signal(s) so that one or more RNA molecules that hybridize or self-hybridize to form an RNAi molecule is transcribed when the vector is present within a cell. Use of the term “induce” is not intended to indicate that the RNAi agent necessarily activates or upregulates RNAi in general but simply indicates that presence of the vector within a cell results in production of an RNAi agent within the cell, leading to an RNAi-mediated reduction in expression of an RNA to which the agent is targeted.

[0067] An RNAi-inducing entity is considered to be targeted to a target transcript for the purposes described herein if (1) the agent comprises a strand that is substantially complementary to the target transcript over 15-29 nucleotides, e.g., 15, more preferably at least about 17, yet more preferably at least about 18 or 19 to about 21-23 or 24-29 nucleotides. For example, in various embodiments of the invention the agent comprises a strand that has at least about 70%, preferably at least about 80%, 84%, 89%, 90%, 91%, 92%, 93%, 94%, 95%, 96%, 97%, 98%, 99%, or 100% precise sequence complementarity with the target transcript over a window of evaluation between 15-29 nucleotides in length, e.g., over a window of evaluation of at least 15, more preferably at least about 17, yet more preferably at least about 18 or 19 to about 21-23 or 24-29 nucleotides in length; or (2) one strand of the RNAi agent hybridizes to the target transcript under stringent conditions for hybridization of small (<50 nucleotide) RNA molecules in vitro and/or under conditions typically found within the cytoplasm or nucleus of mammalian cells.

[0068] As used herein, the term “complementary” refer to the capacity for precise pairing between particular bases, nucleosides, nucleotides or nucleic acids. For example, adenine (A) and uridine (U) are complementary; adenine (A) and thymidine (T) are complementary; and guanine (G) and cytosine (C), are complementary and are referred to in the art as Watson-Crick base pairings. If a nucleotide at a certain position of a first nucleic acid sequence is complementary to a nucleotide located opposite in a second nucleic acid sequence, the nucleotides form a complementary base pair, and the nucleic acids are complementary at that position. One of ordinary skill in the art will appreciate that the nucleic acids are aligned in antiparallel orientation (i.e., one nucleic acid is in 5′ to 3′ orientation while the other is in 3′ to 5′ orientation). A degree of complementarity of two nucleic acids or portions thereof may be evaluated by determining the total number of nucleotides in both strands that form complementary base pairs as a percentage of the total number of nucleotides over a window of evaluation when the two nucleic acids or portions thereof are aligned in antiparallel orientation for maximum complementarity. According to some embodiments, if the window of evaluation is 15-16 nucleotides long, substantially complementary nucleic acids may have 0-3 mismatches within the window; if the window is 17 nucleotides long, substantially complementary nucleic acids may have 0-4 mismatches within the window; if the window is 18 nucleotides long, substantially complementary nucleic acids may have may contain 0-5 mismatches within the window; if the window is 19 nucleotides long, substantially complementary nucleic acids may contain 0-6 mismatches within the window. In certain embodiments the mismatches are not at continuous positions. In certain embodiments the window contains no stretch of mismatches longer than two nucleotides in length. In preferred embodiments a window of evaluation of 15-19 nucleotides contains 0-1 mismatch (preferably 0), and a window of evaluation of 20-29 nucleotides contains 0-2 mismatches (preferably 0-1, more preferably 0).

[0069] According to some embodiments, the RNAi molecules disclosed herein may be purified. Purification of the nucleic acids described herein may include, but is not limited to, nucleic acid clean-up, quality assurance and quality control. Clean-up may be performed by methods known in the arts such as, but not limited to, AGENCOURT® beads (Beckman Coulter Genomics, Danvers, Mass.), or HPLC based purification methods such as, but not limited to, strong anion exchange HPLC, weak anion exchange HPLC, reverse phase HPLC (RP-HPLC), and hydrophobic interaction HPLC (HIC-HPLC). The term “purified” when used in relation to a nucleic acid such as a “purified nucleic acid” refers to one that is separated from at least one contaminant. A “contaminant” is any substance that makes another unfit, impure or inferior. Thus, a purified nucleic acid (e.g., DNA and RNA) is present in a form or setting different from that in which it is found in nature, or a form or setting different from that which existed prior to subjecting it to a treatment or purification method.

[0070] As used herein, the terms “single-stranded positive-strand virus” or “single-stranded positive-strand RNA virus”, refer to a virus having a genome of either “positive” (also referred to as “plus”) strand RNA i.e. protein is translated either directly from the viral genome or from RNA intermediaries having the same polarity as the corresponding viral mRNA.

[0071] As used herein, the term “SARS-CoV-2” is directed to a pleomorphic RNA virus of the Corona genus Coronavirus in the Coronaviridae. When infecting humans, the SARS-CoV-2 virus may result in the COVID-19 condition. The SARS-CoV-2 genome is represented by the nucleic acid sequence as set forth by Accession No.: NC_045512.2.

[0072] As used herein, the term viral “nucleoprotein” (also termed a “capsid protein” or a “nucleocapsid protein”) is a viral polypeptide that sequesters viral RNA and affects viral transcription. The viral nucleoprotein is capable of forming a nucleic acid/protein complex (i.e., a ribonucleoprotein (RNP) complex). A nucleoprotein is distinguished from an outer capsid protein, which generally does not contact and sequester the viral genome. The terms “nucleoprotein mRNA,” and “nucleoprotein transcript,” are understood to include any mRNA that encodes a viral nucleoprotein or its functional equivalent.

[0073] As used herein, the term “subject” includes humans and non-human mammals. In a preferred embodiment, the subject is a human. In other embodiments, the subject can be any other intermediate hosts capable of transmitting or transforming the virus into a human virus, such as but not limited to Rhinolophus sinicus. According to some embodiments, the subject is a patient, i.e. suffering from COVID-19 infections. According to some embodiments, the subject is a subject with an essentially asymptomatic COVID-19 infections. According to some embodiments, the subject is a subject suspected of being, yet not confirmed as being infected with SARS-CoV-2. According to some embodiments, the subject is a caregiver (e.g. a doctor, a nurse or family member) attending to a patient infected with or suspected as being infected with SARS-CoV-2.

[0074] As used herein, the term “host” may refer to any animal capable of being infected by the virus. According to some embodiments, the host is a human. According to some embodiments, the host is a mammal.

[0075] According to some embodiments, the subject may be an intermediate host. As used herein the term “intermediate hist” refers to a non-human mammal which poses high risk of transferring the virus to humans.

[0076] As used herein, the term “individual having high risk of severe illness if infected with SARS-CoV-2 may refer to older adults (e.g. above 60 or above 65), People who live in a nursing home or long-term care facility and people of any age who have serious underlying medical conditions might be at higher risk for severe illness from COVID-19, such as individuals suffering from moderate-to-severe asthma, chronic lung disease, diabetes, serious heart conditions, chronic kidney disease, severe obesity, immunocompromised subjects, or liver disease.

[0077] As used herein, the term “administration” to a subject can be carried out using known procedures, at dosages and for periods of time effective to provide the desired effect e.g. protection of the subject from infection, prevention of spread of the virus from an infected patient to a caregiver and/or for temporary reduction of viral load at least in the nasal and/or buccal tissues of the treated subject. An effective amount of the therapeutic compound necessary to achieve a therapeutic effect may vary according to factors such as the age, sex, and weight of the subject, and the ability of the therapeutic compound to treat the foreign agents in the subject. Dosage regimens can be adjusted to provide the optimum therapeutic response.

[0078] Administration as used herein encompass both one subject providing administering the herein disclosed RNAi molecules or compositions comprising same to another subject as well as self-administration.

[0079] “Administering” includes routes of administration which allow the compositions of the invention to perform their intended function, e.g., proving protection from infection. A variety of routes of administration are possible including, but not necessarily limited to parenteral (e.g., intravenous, intraarterial, intramuscular, subcutaneous injection), oral (e.g., dietary), inhalation (e.g., aerosol to lung), topical, nasal, rectal, or via slow releasing microcarriers depending on the disease or condition to be treated. Inhalation and nasal and/or buccal spraying are preferred modes of administration. Formulation of the compound to be administered will vary according to the route of administration selected (e.g., solution, emulsion, gels, aerosols, capsule). An appropriate composition comprising the compound to be administered can be prepared in a physiologically acceptable vehicle or carrier and optional adjuvants and preservatives. For solutions or emulsions, suitable carriers include, for example, aqueous or alcoholic/aqueous solutions, emulsions or suspensions, including saline and buffered media, sterile water, creams, ointments, lotions, oils, pastes and solid carriers.

[0080] In some embodiments, the composition is in a form suitable for inhalation. In some embodiments, the form of the composition is selected from the group consisting of nose drops, nasal sprays, sprayable liquid composition, inhalants and throat sprays. In some embodiments, the composition is provided in pressurized aerosol dosage form.

[0081] According to some embodiments, the RNAi molecules may be administered as naked RNA.

[0082] In some embodiments, there is provided a device comprising a pressurized aerosol dosage form of any one of the compositions disclosed herein, the device configured to produce aerosol from the pressurized aerosol dosage form. In some embodiments, the device is selected from the group consisting of nebulizer, MESH ultrasonic nebulizer, inhaler and atomizer. In some embodiments, said device is a hand-held device. Each possibility is a separate embodiment.

[0083] In some embodiments, said administering is via inhalation, e.g. utilizing apparatus configured to produce vapor and/or aerosol.

[0084] Inhalation administration can include an intranasal spray. Various forms suitable for administration by inhalation include aerosols, mists or powders. Each possibility is a separate embodiment.

[0085] Pharmaceutical compositions comprising the composition disclosed herein can be delivered in the form of an aerosol spray presentation from pressurized packaging or a nebulizer, e.g., with the use of a propellant (e.g., dichlorodifluoromethane, trichlorofluoromethane, dichlorotetrafluoroethane, carbon dioxide, or the like).

[0086] In some embodiments, the aerosol dosage form is encapsulated in a cartridge or a capsule.

[0087] In some embodiments, the composition disclosed herein is in a form of capsules or cartridges for use within a pressurized delivery system.

[0088] In some embodiments, the composition disclosed herein can be formulated into liquid compositions sprayable from non-aerosol packaging.

[0089] As used herein, the term “prevent infection” may refer to reduce the chance of a non-infected individual being infected with a virus e.g., SARS-CoV-2 when encountering an infected subject. For example, preventing infection of a caregiver attending to an infected subject.

[0090] As used herein, the term “reducing/attenuating/preventing spread” refers to reducing the chance of an infected subject infecting another subject during an encounter. As a non-limiting example, preventing spread may include preventing an infected patient from infecting others. As another non-limiting example, preventing spread may include preventing a caregiver being infected, optionally without knowledge thereof (e.g. due to the infection being asymptomatic or during latency) from spreading the infection to others.

[0091] As used herein, the term “reducing viral load” refers to, an optionally temporary reduction in the number of viral particles at least in treated tissues, such as nasal or buccal tissues.

[0092] As used herein, the term, a “pharmaceutically acceptable carrier” includes any and all solvents, dispersion media, coatings, antibacterial and antifungal agents, isotonic and absorption delaying agents, and the like which are compatible with the activity of the compound and are physiologically acceptable to the subject. An example of a pharmaceutically acceptable carrier is buffered normal saline (0.15M NaCl). The use of such media and agents for pharmaceutically active substances is well known in the art. Except insofar as any conventional media or agent is incompatible with the therapeutic compound, use thereof in the compositions suitable for pharmaceutical administration is contemplated. Supplementary active compounds can also be incorporated into the compositions.

[0093] “Additional ingredients” include, but are not limited to, one or more of the following: excipients; surface active agents; dispersing agents; inert diluents; granulating and disintegrating agents; binding agents; lubricating agents; sweetening agents; flavoring agents; coloring agents; preservatives; physiologically degradable compositions such as gelatin; aqueous vehicles and solvents; oily vehicles and solvents; suspending agents; dispersing or wetting agents; emulsifying agents, demulcents; buffers; salts; thickening agents; fillers; emulsifying agents; antioxidants; antibiotics; antifungal agents; stabilizing agents; and pharmaceutically acceptable polymeric or hydrophobic materials.

[0094] According to some embodiments, the transport vehicle may be a liposome. As used herein, the term “liposomes” refer to microscopic vesicles having an interior aqua space sequestered from an outer medium by a membrane of one or more bilayers. Bilayer membranes of liposomes are typically formed by amphiphilic molecules, such as lipids of synthetic or natural origin that comprise spatially separated hydrophilic and hydrophobic domains. The decoy transcript may be completely or partially located in the interior space of the liposome, within the bilayer membrane of the liposome, or associated with the exterior surface of the liposome membrane. The liposome may facilitate or assist in the delivery of the decoy transcript into a target cell. The liposome may also protect the nucleic acid from an environment which may contain enzymes or chemicals that degrade nucleic acids and/or systems or receptors that cause the rapid excretion of the nucleic acids.

[0095] According to some embodiments, the transport vehicle may be a nanoparticle. As used herein, a “nanoparticle” refers to a colloidal particle for delivery of a molecule or agent that is microscopic in size of between or about between 1 and 1000 nanometers (nm), such as between 1 and 100 nm and behave as a whole unit in terms of transport and properties. Nanoparticles include those that are uniform in size. Nanoparticles include those that contain a targeting molecule attached to the outside.

[0096] According to some embodiments, the nanoparticle may be a lipid nanoparticle. As used herein, the term “lipid nanoparticle” refers to a transfer vehicle comprising one or more lipids (e.g., cationic lipids, non-cationic lipids, and PEG-modified lipids). Preferably, the lipid nanoparticles are formulated to deliver decoy transcript into target cells. Examples of suitable lipids include, for example, the phosphatidyl compounds (e.g., phosphatidylglycerol, phosphatidylcholine, phosphatidylserine, phosphatidylethanolamine, sphingolipids, cerebrosides, and gangliosides). Also contemplated is the use of polymers as transfer vehicles, whether alone or in combination with other transfer vehicles. Suitable polymers may include, for example, polyacrylates, polyalkycyanoacrylates, polylactide, polylactide-polyglycolide copolymers, polycaprolactones, dextran, albumin, gelatin, alginate, collagen, chitosan, cyclodextrins, dendrimers and polyethylenimine.

[0097] As used herein, the terms “approximately” or “about” in reference to a number are generally taken to include numbers that fall within a range of 5% or in the range of 1% in either direction (greater than or less than) the number unless otherwise stated or otherwise evident from the context (except where such number would exceed 100% of a possible value). Where ranges are stated, the endpoints are included within the range unless otherwise stated or otherwise evident from the context.

[0098] As used herein, the singular forms “a,” “an” and “the” include plural referents unless the context clearly dictates otherwise.

[0099] As used herein, “optional” or “optionally” means that the subsequently described event or circumstance does or does not occur, and that the description includes instances where said event or circumstance occurs and instances where it does not.

[0100] According to some embodiments, there is provided an isolated ribonucleic acid interfering (RNAi) molecule, the RNAi molecule comprising a dsRNA sequence of from about 15 to about 60 base pairs or from about 15 to about 30 base pairs or from about 18 to about 24 base pairs, capable of decreasing expression of a SARS-CoV-2 gene.

[0101] According to some embodiments, the RNAi molecule comprises a nucleotide sequence having at least 70%, at least 80%, at least 85%, at least 90%, at least 95%, at least 98% or 100% sequence homology to an untranslated sequence (UTR) of SARS-CoV-2 (3′UTR or 5′ UTR).

[0102] According to some embodiments, the RNAi molecule comprises a nucleotide sequence having at least 70%, at least 80%, at least 85%, at least 90%, at least 95%, at least 98% or 100% sequence homology to the nsp8 gene of SARS-CoV-2.

[0103] According to some embodiments, the RNAi molecule comprises a nucleotide sequence having at least 70%, at least 80%, at least 85%, at least 90%, at least 95%, at least 98% or 100% sequence homology to the nsp2 gene of SARS-CoV-2.

[0104] According to some embodiments, the RNAi molecule comprises a nucleotide sequence having at least 70%, at least 80%, at least 85%, at least 90%, at least 95%, at least 98% or 100% sequence homology to the nsp3 gene of SARS-CoV-2.

[0105] According to some embodiments, the RNAi molecule comprises a nucleotide sequence having at least 70%, at least 80%, at least 85%, at least 90%, at least 95%, at least 98% or 100% sequence homology to the nsp4 gene of SARS-CoV-2.

[0106] According to some embodiments, the RNAi molecule comprises a nucleotide sequence having at least 70%, at least 80%, at least 85%, at least 90%, at least 95%, at least 98% or 100% sequence homology to the nsp6 gene of SARS-CoV-2.

[0107] According to some embodiments, the RNAi molecule comprises a nucleotide sequence having at least 70%, at least 80%, at least 85%, at least 90%, at least 95%, at least 98% or 100% sequence homology to the nsp7 gene of SARS-CoV-2.

[0108] According to some embodiments, the RNAi molecule comprises a nucleotide sequence having at least 70%, at least 80%, at least 85%, at least 90%, at least 95%, at least 98% or 100% sequence homology to the nsp9 gene of SARS-CoV-2.

[0109] According to some embodiments, the RNAi molecule comprises a nucleotide sequence having at least 70%, at least 80%, at least 85%, at least 90%, at least 95%, at least 98% or 100% sequence homology to the nspll gene of SARS-CoV-2.

[0110] According to some embodiments, the RNAi molecule comprises a nucleotide sequence having at least 70%, at least 80%, at least 85%, at least 90%, at least 95%, at least 98% or 100% sequence homology to the 2′-0-ribose methyltransferase gene of SARS-CoV-2.

[0111] According to some embodiments, the RNAi molecule comprises a nucleotide sequence having at least 70%, at least 80%, at least 85%, at least 90%, at least 95%, at least 98% or 100% sequence homology to the 3′-To-5′ exonuclease gene of SARS-CoV-2.

[0112] According to some embodiments, the RNAi molecule comprises a nucleotide sequence having at least 70%, at least 80%, at least 85%, at least 90%, at least 95%, at least 98% or 100% sequence homology to the 3C-like proteinase gene of SARS-CoV-2.

[0113] According to some embodiments, the RNAi molecule comprises a nucleotide sequence having at least 70%, at least 80%, at least 85%, at least 90%, at least 95%, at least 98% or 100% sequence homology to the E-protein gene of SARS-CoV-2.

[0114] According to some embodiments, the RNAi molecule comprises a nucleotide sequence having at least 70%, at least 80%, at least 85%, at least 90%, at least 95%, at least 98% or 100% sequence homology to the endoRNAse gene of SARS-CoV-2.

[0115] According to some embodiments, the RNAi molecule comprises a nucleotide sequence having at least 70%, at least 80%, at least 85%, at least 90%, at least 95%, at least 98% or 100% sequence homology to the helicase gene of SARS-CoV-2.

[0116] According to some embodiments, the RNAi molecule comprises a nucleotide sequence having at least 70%, at least 80%, at least 85%, at least 90%, at least 95%, at least 98% or 100% sequence homology to a leader sequence of SARS-CoV-2.

[0117] According to some embodiments, the RNAi molecule comprises a nucleotide sequence having at least 70%, at least 80%, at least 85%, at least 90%, at least 95%, at least 98% or 100% sequence homology to the M-protein gene of SARS-CoV-2.

[0118] According to some embodiments, the RNAi molecule comprises a nucleotide sequence having at least 70%, at least 80%, at least 85%, at least 90%, at least 95%, at least 98% or 100% sequence homology to the N-protein gene of SARS-CoV-2.

[0119] According to some embodiments, the RNAi molecule comprises a nucleotide sequence having at least 70%, at least 80%, at least 85%, at least 90%, at least 95%, at least 98% or 100% sequence homology to the ORF lab gene of SARS-CoV-2.

[0120] According to some embodiments, the RNAi molecule comprises a nucleotide sequence having at least 70%, at least 80%, at least 85%, at least 90%, at least 95%, at least 98% or 100% sequence homology to the ORF10 gene of SARS-CoV-2.

[0121] According to some embodiments, the RNAi molecule comprises a nucleotide sequence having at least 70%, at least 80%, at least 85%, at least 90%, at least 95%, at least 98% or 100% sequence homology to the ORF3a gene of SARS-CoV-2.

[0122] According to some embodiments, the RNAi molecule comprises a nucleotide sequence having at least 70%, at least 80%, at least 85%, at least 90%, at least 95%, at least 98% or 100% sequence homology to the ORF6 gene of SARS-CoV-2.

[0123] According to some embodiments, the RNAi molecule comprises a nucleotide sequence having at least 70%, at least 80%, at least 85%, at least 90%, at least 95%, at least 98% or 100% sequence homology to the ORF7a gene of SARS-CoV-2.

[0124] According to some embodiments, the RNAi molecule comprises a nucleotide sequence having at least 70%, at least 80%, at least 85%, at least 90%, at least 95%, at least 98% or 100% sequence homology to the ORF7b gene of SARS-CoV-2.

[0125] According to some embodiments, the RNAi molecule comprises a nucleotide sequence having at least 70%, at least 80%, at least 85%, at least 90%, at least 95%, at least 98% or 100% sequence homology to the ORF8 gene of SARS-CoV-2.

[0126] According to some embodiments, the RNAi molecule comprises a nucleotide sequence having at least 70%, at least 80%, at least 85%, at least 90%, at least 95%, at least 98% or 100% sequence homology to the RNA-dependent RNA polymerase gene of SARS-CoV-2.

[0127] According to some embodiments, the RNAi molecule comprises a nucleotide sequence having at least 70%, at least 80%, at least 85%, at least 90%, at least 95%, at least 98% or 100% sequence homology to the S-protein gene of SARS-CoV-2.

[0128] According to some embodiments, the RNAi molecule comprises a nucleotide sequence having at least 70%, at least 80%, at least 85%, at least 90%, at least 95%, at least 98% or 100% sequence homology to any one of the SEQ ID NOs: 1-14425. According to some embodiments, the RNAi molecule comprises a nucleotide sequence having at least 70%, at least 80%, at least 85%, at least 90%, at least 95%, at least 98% or 100% sequence homology to any one of the SEQ ID NOs: 1-99; or SEQ ID Nos 1-80, or SEQ ID Nos: 3-10; or 4 and 6-9; or SEQ ID Nos: 11-29 and 82; or SEQ ID Nos: 12-13; or SEQ ID Nos: 30-46, 80 and 81; or SEQ ID Nos: 33-35 and 46; or SEQ ID Nos: 47-71 and 83-88; or SEQ ID Nos: 53, 54, 60, 62, 66, 68, 69, 83 and 84; or SEQ ID Nos: 72-78; or SEQ ID Nos: 76-78. Each possibility is a separate embodiment.

[0129] According to some embodiments, the RNAi molecule comprises a nucleotide sequence having at least 70%, at least 80%, at least 85%, at least 90%, at least 95%, at least 98% or 100% sequence homology to an untranslated sequence (UTR) of SARS-CoV-2 (3′UTR or 5′ UTR, the nucleotide sequence selected from the sequences set forth in SEQ ID NO: 1, 2 and 79, SEQ ID Nos 1 and 2. Each possibility is a separate embodiment.

[0130] According to some embodiments, the RNAi molecule comprises a nucleotide sequence having at least 70%, at least 80%, at least 85%, at least 90%, at least 95%, at least 98% or 100% sequence homology to the RNA sequence encoding nsp8 of SARS-CoV-2, the nucleotide sequence selected from the sequences set forth in SEQ ID NOs: 3-10, set forth in SEQ ID NOs 4 and 6-9, or set forth in SEQ ID Nos. Each possibility is a separate embodiment.

[0131] According to some embodiments, the RNAi molecule comprises a nucleotide sequence having at least 70%, at least 80%, at least 85%, at least 90%, at least 95%, at least 98% or 100% sequence homology to an RNA sequence encoding helicase of SARS-CoV-2, the nucleotide sequence selected from the sequences set forth in SEQ ID NO: 11-29, 82 and 99; or set forth in SEQ ID Nos: 12-13. Each possibility is a separate embodiment.

[0132] According to some embodiments, the RNAi molecule comprises a nucleotide sequence having at least 70%, at least 80%, at least 85%, at least 90%, at least 95%, at least 98% or 100% sequence homology to an RNA sequence encoding the leader protein of SARS-CoV-2, the nucleotide sequence selected from the sequences set forth in SEQ ID Nos: 1, 2 and 79, set forth in SEQ ID NO: 1 and 2. Each possibility is a separate embodiment.

[0133] According to some embodiments, the RNAi molecule comprises a nucleotide sequence having at least 70%, at least 80%, at least 85%, at least 90%, at least 95%, at least 98% or 100% sequence homology to an RNA sequence being reverse complement to the leader protein of SARS-CoV-2, the nucleotide sequence selected from the sequences set forth in SEQ ID NOs: 72-78 or set forth in SEQ ID Nos: 76-78. Each possibility is a separate embodiment.

[0134] According to some embodiments, the RNAi molecule comprises a nucleotide sequence having at least 70%, at least 80%, at least 85%, at least 90%, at least 95%, at least 98% or 100% sequence homology to an RNA sequence encoding the RNA-dependent RNA polymerase of SARS-CoV-2, the nucleotide sequence selected from the sequences set forth in SEQ ID NOs: 30-46, 80 and 81 or set forth in SEQ ID Nos: 33-35 and 46. Each possibility is a separate embodiment.

[0135] According to some embodiments, the RNAi molecule comprises a nucleotide sequence having at least 70%, at least 80%, at least 85%, at least 90%, at least 95%, at least 98% or 100% sequence homology to an RNA sequence encoding the S-protein of SARS-CoV-2, the nucleotide sequence selected from the sequences set forth in SEQ ID NOs: 47-71 and 83-88 or set forth in SEQ ID Nos: 53, 54, 60, 62, 66, 68, 69, 83 and 84. Each possibility is a separate embodiment.

[0136] According to some embodiments, the RNAi molecule comprises a nucleotide sequence having at least 70%, at least 80%, at least 85%, at least 90%, at least 95%, at least 98% or 100% sequence homology to an RNA sequence encoding the nucleotide sequence selected from the sequences set forth in SEQ ID NOs: SEQ ID Nos 9353, 9452, 9549 and 14426-14428. Each possibility is a separate embodiment.

[0137] According to some embodiments, the RNAi molecule comprises a nucleotide sequence having at least 70%, at least 80%, at least 85%, at least 90%, at least 95%, at least 98% or 100% sequence homology to an RNA sequence encoding the nucleotide sequence set forth in SEQ ID NO: 9549.

[0138] According to some embodiments, the RNAi molecules may be stabilized. As used herein a “stabilized RNA” molecule may refer to RNA molecules that can contain stabilizing elements, including, but not limited to a 5′-cap structure or a 3′-poly(A) tail.

[0139] The 5′-capping of polynucleotides may be completed concomitantly during the in vitro-transcription reaction e.g. using the following chemical RNA cap analogs to generate the 5′-guanosine cap structure according to manufacturer protocols: 3′-O-Me-m7G(5′)ppp(5′) G [the ARCA cap]; G(5′)ppp(5′)A; G(5′)ppp(5′)G; m7G(5′)ppp(5′)A; m7G(5′)ppp(5′)G (New England BioLabs, Ipswich, Mass.). 5′-capping of modified RNA may be completed post-transcriptionally using a Vaccinia Virus Capping Enzyme to generate the “Cap 0” structure: m7G(5′)ppp(5′)G (New England BioLabs, Ipswich, Mass.). Cap 1 structure may be generated using both Vaccinia Virus Capping Enzyme and a 2′-O methyl-transferase to generate: m7G(5′)ppp(5′)G-2′-O-methyl. Cap 2 structure may be generated from the Cap 1 structure followed by the 2′-O-methylation of the 5′-antepenultimate nucleotide using a 2′-O methyl-transferase. Cap 3 structure may be generated from the Cap 2 structure followed by the 2′-O-methylation of the 5′-preantepenultimate nucleotide using a 2′-O methyl-transferase. Each possibility is a separate embodiment. According to some embodiments, the capping comprises a 7-methylguanosine cap (m7G) or a m7G-analog.

[0140] According to some embodiments, the first and/or second strands of the RNAi molecule and the second strands have a 3′ single-stranded overhang. According to some embodiments, the overhang comprises at least 2, 3, 4, 5, 10 or more nucleotides. According to some embodiments, the overhang includes 2-10, 2-4 nucleotides. According to some embodiments, the overhang may be of exactly 2 nucleotides.

[0141] According to some embodiments, the RNAi molecule may be a siRNA or a shRNA. According to some embodiments, the RNAi molecule includes a sequence of at least 15 contiguous nucleotides that are complementary or substantially complementary to a sequence within the genome of the SARS-CoV2 genome. According to some embodiments, the RNAi molecule may be a siRNA or a shRNA. According to some embodiments, the RNAi molecule includes a sequence of at least 15 contiguous nucleotides that are complementary or substantially complementary to a opposite strand sequence of the SARS-CoV-2 genome.

[0142] Reference is now made to FIG. 1 which is a flowchart of an optional method 100 for identifying potential RNAi molecules.

[0143] According to some embodiments, a list of siRNA molecules complementary to SARS-CoV-2 may be provided using the below listed guidelines and set forth in FIG. 1. According to some embodiments, the siRNA may have a length of 19nt. Advantageously, such rather short RNAi molecules reduce the cost of the final therapeutic product while still ensuring target specificity.

[0144] In step 110 of the method, a sequence of a virus the targeting of which is desired is provided, for example, using a BioPython function that downloads a NCBI entry of the virus.

[0145] In step 120 the viral genome is parsed into its genomic elements, e.g. based on the information from the NCBI entry. For each element, a distinct file that describes the underlying genomic sequence is generated. Optionally, the element may be chopped into d pieces, where d may be a user specified value.

[0146] In step 130, genomic elements of interest are identified.

[0147] In step 140, multiple siRNA prediction algorithms that assess the genomic elements are applied. Non-limiting examples of suitable algorithms include: RNAxs (http://rna.tbi.univie.ac.at/cgi-bin/RNAxs/RNAxs.cgi), DSIR (http://biodev.cea.fr/DSIR/DSIR.php), and OligoWalk (http://rna.urmc.rochester.edu/cgi-bin/server_exe/oligowalk/oligowalk.pl), and for each genomic element, the output of all prediction algorithms is harmonized.

[0148] In step 150, siRNA molecules that pass a predetermined selection threshold in more than one algorithm are identified. This increases the chance that the siRNA is indeed potent and has high efficacy. Optionally, a cross-correlation matrix is calculated. Without being limited by any theory, a loose correlation, suggests that each algorithm captures unique information.

[0149] In step 160, a conservation score is calculated for each siRNA that passed all prediction algorithms. To this end, all known viral strains of the target virus are first identified. The sequence of each strain is then scanned and overlapping k-mer sequences extracted, where k=19nt to match the siRNA target size. A hash data structure that maps the k-mer sequence to all strains that it appeared in is then recorded from extracted k-mers. The hash data structure is then iterated to enumerate the number of strains that the specific 19nt target sequence appears in, the number being serving as the conservation score. It is understood that while conserved sequences are preferred, this step is optional.

[0150] In step 170, the possibility of off-target effects is evaluated. Optionally two types of algorithms are utilized:
[0151] a. The melting temperature of the seed region of the guide and the passenger RNA strands of the siRNA are calculated. The melting temperature is calculated using the nearest-neighbor method number 1 of BioPython with no slat correction. Advantageously, this setting obtains the closest melting predictions as in Ui-Tei et al., Nucleic Acid Research, 2008 with a Pearson correlation of over 85%.
[0152] b. The number of matches of the siRNA target to potential host transcripts is calculated. Previous studies have suggested aligning the siRNA strands to the human genome. However, since most of the genome is not transcribed and since many transcripts are the product of splicing, this approach was declined. Instead, the human transcriptome is downloaded (Homo_sapiens.GRCh38.cdna.all) e.g. from the Ensembl website and transformed to a Burrows-Wheeler (BWT) data structure using Bowtie v1. Each siRNA was then aligned to the human transcriptome in a BWT structure using bowtie. Specifically, the following parameters ‘-n3-18-p4-a-y’ were used so as to increase the sensitivity of Bowite to short targets, such as siRNA targets. Two numbers were calculated: 1) the number of human transcripts that contain a close match to the guide or passenger siRNA strands and 2) the number of transcripts that contain a loose match to the guide or passenger targets. A close match is defined as zero mismatches between the seed regions of either strands to the transcript or up to one match in the rest of the siRNA. A loose match is defined as up to one mismatch in the seed region or up to two mismatches in the entire siRNA.

[0153] In step 180, the siRNAs are synthesized for experimental evaluation.

[0154] Reference is now made to FIG. 2, which is a flowchart of an additional or alternative optional method 200 for identifying potential RNAi molecules.

[0155] According to some embodiments, a list of siRNA molecules complementary to SARS-CoV-2 may be provided using the below listed guidelines and set forth in FIG. 2. According to some embodiments, the RNAi molecules (shRNA or siRNA).

[0156] In step 210 of the method, a sequence of a virus the targeting of which is desired is provided, for example, using a BioPython function that downloads a NCBI entry of the virus.

[0157] In step 220, the viral genome is scanned and strings of 22nt sequences are extracted from it with shifts of one nucleotide. Each 22mer is a potential target region and undergoes the following sub steps:
[0158] a. The 22nt sequence of the target region is reversed and complemented and this is the guide strand of the shRNA or the siRNA.
[0159] b. If shRNA is created, the guide strand is reversed and complemented one more time to create the passenger strand. The passenger strand is subject to another processing step such that if the 3′ end of the guide strand is either A or T, then the 5′ end of the passenger strand is set to “C”. Alternatively, if the 3′ end of the guide strand is either C or G, then the 5′ end of the passenger strand is set to “A”.
[0160] c. If siRNA is created, the guide strand is reversed and complemented one more time to create the passenger strand. Both the guide and the target are transcribed, and optionally a “UU” overhang at the 3′ end of each of the strands is added.

[0161] In step 230, potentially potent shRNA/siRNAs are identified by subjecting the guide and the passenger strands to one or more (optionally all) of the following steps:
[0162] a. shRNAs whose targets (plus 14nt from each side) have homopolymers above 4nt are filtered out. This step may be taken since such homopolymers are hard to synthesize and therefore are less likely to create an effective clinical grade shRNA/siRNA molecule. In addition, homopolymers tend to be genomically unstable and undergo rapid evolution, which help the virus to escape the RNAi treatment.
[0163] b. shRNA guides that start with either A or T are filtered out. Without being bound by any theory, this filtering significantly increases the odds of an shRNA to be highly potent.
[0164] c. shRNA guides having a total number of AU nucleotides between 9 to 18 are filtered out. Without being bound by any theory, this filtering significantly increases the odds of an shRNA to be highly potent.
[0165] d. shRNAs containing certain restriction sites are filtered out. Without being bound by any theory, this enables better cloning in case shRNA rather than siRNA molecules are used as the therapeutic agent.
[0166] e. Optionally, shRNA guides that have no “A” in position 20 are identified. Without being bound by any theory, this filtering significantly increases the odds of an shRNA to be highly potent.

[0167] In step 240, a conservation score is calculated, as essentially described above. However, instead of k=19nt, a k=22nt was applied in order to be compatible with the longer guide and passenger strands. It is understood that while conserved sequences are preferred, this step is optional.

[0168] In step 250, the possibility of off-target effects are evaluated as essentially described above with the modification that any RNAi molecules having passenger or guide strands with less than 2 mismatches or less than 1 mismatch to a human transcript in the seed region were filtered out.

[0169] In step 260, the siRNAs are synthesized for experimental evaluation.

[0170] Reference is now made to FIG. 3, which is a flowchart of an additional or alternative optional method 300 for identifying potential RNAi molecules.

[0171] According to some embodiments, a list of siRNA molecules complementary to SARS-CoV-2 may be provided using the below listed guidelines and set forth in FIG. 3. According to some embodiments, the RNAi molecules (shRNA or siRNA).

[0172] This method is based on repurposing siRNAs that have been identified as potent in strains similar to the target virus of interest. A notable challenge of this approach is when the sequence homology is of 70% or less., Without being bound by any theory, the probability of finding stretches of identical 19nt nucleotides may be roughly estimated to be in the order of of 0.7\hat{ }19=0.0013. On the other hand, if identified such siRNA likely reflect evolutionary conserved regions and therefore are likely to offer protection against a wide variety of strains.

[0173] In step 310 of the method, NCBI's PubMed manuscripts are scanned for the words siRNA and “virus strain name”. The text is then scanned to find uninterrupted strings of letters that are 19 to 25 letters long without a gap and that contain only the following letters: A, C, G, T or U. In addition, in some embodiments, the virsiRNAdb database is scanned for entries for the virus name and these entries are downloaded and the siRNA sequences are parsed.

[0174] In step 320, the identified siRNAs are aligned to the target genome and to its reverse complement without allowing for gaps or mismatches besides at the 3′ tail that sometimes have an overhang.

[0175] In steps 330 and 340 conservation scores and off-target effects are determined as described with respect to FIG. 1 and the RNAi molecule synthesized (step 350).

[0176] The following examples are included to demonstrate examples of certain preferred embodiments of the invention. It should be appreciated by those of skill in the art that the techniques disclosed in the examples that follow represent approaches the inventors have found function well in the practice of the invention, and thus can be considered to constitute examples of preferred modes for its practice. However, those of skill in the art should, in light of the present disclosure, appreciate that many changes can be made in the specific embodiments that are disclosed and still obtain a like or similar result without departing from the spirit and scope of the invention.

### EXAMPLES

[0177] Example 1—Identifying siRNA Molecules Against the SARS-CoV-2

[0178] A list of siRNA molecules complementary to SARS-CoV-2 was provided using the method as essentially outlined in FIG. 1.

[0179] In short, the BioPython function was utilized to download the entry “NC_045512.2” (set forth in SEQ ID NO: 1) from the NCBI website. This entry describes the reference genome of the SARS-CoV-2 from a Wuhan patient and is given in an annotated format that indicates the different genomic elements of the virus.

[0180] The genome SARS-CoV-2 was then parsed into its various genomic elements based on the information from the NCBI entry. For each element, a distinct file that describes the underlying genomic sequence was generated. Element having a length of above 10000nt were chopped into 3 pieces.

[0181] The following genomic elements were identified as being of interest: 5′UTR, nsp8 (primase), nsp12 (RNA-dependent RNA polymerase), 3′UTR, Spike, and the entire ORFlab.

[0182] Next, multiple siRNA prediction algorithms, that assess the genomic elements, were applied. Specifically, RNAxs (http://rna.tbi.univie.ac.at/cgi-bin/RNAxs/RNAxs.cgi), DSIR (http://biodev.cea.fr/DSIR/DSIR.php), and OligoWalk (http://rna.urmc.rochester.edu/cgi-bin/server_exe/oligowalk/oligowalk.pl) were utilized.

[0183] For each genomic element, the output of all prediction algorithms was harmonized and siRNA molecules that pass a predetermined selection threshold in all algorithms were identified.

[0184] For the identified siRNA molecules, a conservation score was calculated. To this end, all known viral strains of SARS-CoV2 available at the NCBI website were identified. The sequence of each strain were scanned and overlapping 19nt sequences were extracted, based upon which the conservation score was calculated.

[0185] Next, for the conserved siRNA, the possibility of off-target effects was evaluated using two types of algorithms as described above:
[0186] a. The melting temperature of the seed region of the guide and the passenger RNA strands of the siRNA was calculated.
[0187] b. The number of matches of the siRNA target to potential human transcripts was calculated.

[0188] 522 siRNAs were identified and 80 synthesized for experimental evaluation.

### Example 2—Identifying siRNA Molecules Against the SARS-CoV-2

[0189] A list of siRNA molecules complementary to SARS-CoV-2 was provided using the method as essentially outlined in FIG. 2.

[0190] This pipeline generates a list of shRNA/siRNA molecules of 22nt that are reactive against SARS-CoV-2.

[0191] In short, the BioPython function was utilized to download the entry “NC_045512.2” (set forth in SEQ ID NO: 1) from the NCBI website. This entry describes the reference genome of the SARS-CoV-2 from a Wuhan patient and is given in an annotated format that indicates the different genomic elements of the virus.

[0192] Next, the SARS-CoV-2 reference genome was scanned and 22nt substrings with shifts of one nucleotide were extracted. For each 22mer the following sub steps were carried out:
[0193] a. The 22nt sequence of the target region was reversed and complemented to provide the guide strand of the shRNA.
[0194] b. The guide strand was then reversed and complemented one more time to create the passenger strand. The passenger strand was subsequently subject to another processing step such that if the 3′ end of the guide strand is either A or T, the 5′ end of the passenger strand is set to “C” and if the 3′ end of the guide strand is either C or G, then the 5′ end of the passenger strand is set to “A”.

[0195] Following the filtering described in step 230a-230d of FIG. 2, off-target effects were determined and suitable siRNAs and shRNA synthesized.

In total, 14425shRNA molecules were identified.

### Example 3—Identifying siRNA Molecules Against the SARS-CoV-2

[0196] A list of siRNA molecules complementary to SARS-CoV-2 was provided using the method as essentially outlined in FIG. 3.

[0197] In short, the NCBI's PubMed databases was search for manuscripts with the words siRNA and SARS and the text scanned to find uninterrupted strings of letters that are 19 to 25 letters long without a gap and contain only the following letters: A, C, G, T or U.

[0198] The identified siRNA entries were then aligned to the SARS-CoV-2 genome without allowing for gaps or mismatches besides at the 3′ tail that sometimes have an overhang. From 9422 sequences extracted from the PMCID literature, only 31 aligned to the SARS-CoV-2 genome.

### Example 4—Validation of siRNA Efficiency—Reporter Assay

[0199] The identified RNAi molecules are inserted into an expression vector including a reporter, such as mCherry. The insertion is such that if the RNAi molecule is effective against its target, expression of the reporter (mCherry) decreases.

[0200] In short, HEK 293 FT cells were transfected in duplicate with a) a viral genomic region of interest (e.g., Helicase, Polymerase, Spike, Nsp8, 3′ UTR, Leader or Leader reverse complement transcripts) fused to a reporter gene (e.g., Cherry); b) a reporter gene (e.g., GFP) for normalization of transfection efficiency; and c) the siRNA to be tested.

[0201] The total plasmid amount was 500 ng (equimolar ratio), and the siRNA concentration 1 nM (i.e., significantly lower than commercial concentrations of siRNAs which is around 10-30 nM). Anti-GFPsiRNA served as a positive control (at 30 nM).

[0202] The cells were analyzed by FACS as follows (FIG. 4):
[0203] 1. Initially live cells were gated using FSC vs SSC channels—upper right panel;
[0204] 2. Second single cells were gated (FSC-A vs FSC-H)—lower right panel;
[0205] 3. GFP positive cells (indicative of transfected cells) were then identified; and
[0206] 4. Lastly, the fractions of mCherry+/GFP+ vs. GFP+ only cells counted, indicative of inefficient and efficient siRNA constructs respectively (left panel).

[0207] Representative FACS results of cells transfected with a control siRNA (negative control), target siRNA and siRNA against GFP (positive control) are shown in FIG. 5A, FIG. 5B and FIG. 5C respectively.

[0208] Specifically, the following siRNA sequences were tested three different concentrations of siRNA (1 nM, 500 pM and 100 pM):

[0209] 20 siRNAs against the helicase of SARS-CoV-2 were tested (SEQ ID NOs 11-29 and 82). As seen from FIG. 6A and all the tested siRNA sequences caused a significant reduction in mCherry+GFP/GFP+ ratio indicative of them being efficient siRNAs. A particularly impressive reduction in the ratio was observed for siRNAs hel_13 (SEQ ID NO: 12) and hel_14 (SEQ ID NO: 13)—indicated by arrows. As further seen from FIG. 6B, siRNAs hel_13 and hel_14 caused a 50% or larger reduction in the mCherry+GFP/GFP+ ratio at 80 pM concentration, indicating them being highly potent siRNAs.

[0210] 8 siRNAs (SEQ ID Nos: 3-10) against Nsp8 of SARS-CoV-2 were tested. As seen from FIG. 7A, all the tested siRNA sequences caused a significant reduction in mCherry+GFP/GFP+ ratio indicative of them being efficient siRNAs. A particularly impressive reduction in the ratio was observed for siRNAs siNSP8_5 (SEQ ID NO: 4), siNSP8_7 (SEQ ID NO: 6), siNSP8_8 (SEQ ID NO: 7), siNSP8_9 (SEQ ID NO: 8) and siNSP8_10 (SEQ ID NO: 9)—indicated by arrows). As further seen from FIG. 7B, siRNAs siNSP8_7, siNSP8_8, siNSP8_9 and siNSP8_10 caused a 50% or larger reduction in the mCherry+GFP/GFP+ ratio at a 80 pM concentration, indicating them being highly potent siRNAs.

[0211] 19 siRNAs (SEQ ID Nos: 30-46, 80 and 81) against the RNA dependent RNA polymerase of SARS-CoV-2 were tested. As seen from FIG. 8A, all the tested siRNA sequences caused a reduction in mCherry+GFP/GFP+ ratio indicative of them being efficient siRNAs. A particularly impressive reduction in the ratio was observed for siRNAs siPol_34 (SEQ ID NO: 33), siPol_35 (SEQ ID NO: 34), siPol_36 (SEQ ID NO: 35) and siPol_49 (SEQ ID NO: 46)—indicated by arrows. FIG. 8B, siRNAs siPol_36 and siPol_49 caused an almost 50% reduction in the mCherry+GFP/GFP+ ratio at a 80 pM concentration, indicating them being highly potent siRNAs.

[0212] 15 siRNAs (SEQ ID Nos: 50-64) against Spike1 of SARS-CoV-2 were tested. As seen from FIG. 9A, all but one of the tested siRNA sequences caused a reduction in mCherry+GFP/GFP+ ratio indicative of them being efficient siRNAs. A particularly impressive reduction in the ratio was observed for siRNAs siSpike1_54 (SEQ ID NO: 53), siSpike1_55 (SEQ ID NO: 54), siSpike1_61 (SEQ ID NO: 60) and siSpike1_63 (SEQ ID NO: 62)—indicated by arrows. As further seen from FIG. 9B, siRNA siSpike1_61 caused a larger than 50% reduction in the mCherry+GFP/GFP+ ratio at a 80 pM concentration, indicating them being highly potent siRNAs.

[0213] 14 siRNAs (SEQ ID NOs: 64-71 and 83-88) against Spike2 of SARS-CoV-2 were tested. As seen from FIG. 10, all but two of the tested siRNA sequences caused a reduction in mCherry+GFP/GFP+ ratio indicative of them being efficient siRNAs. A particularly impressive reduction in the ratio was observed for siRNAs siSpike2-67 (SEQ ID NO: 66), siSpike2-69 (SEQ ID NO: 68), siSpike2_70 (SEQ ID NO: 69), siSpike2_M6M9 (SEQ ID NO: 84) and siSpike2_M5 (SEQ ID NO: 83)—indicated by arrows. As further seen from FIG. 9B, siRNA siSpike2_M6 (SEQ ID NO: 84) caused a larger than 50% reduction in the mCherry+GFP/GFP+ ratio at a 80 pM concentration, indicating them being highly potent siRNAs.

[0214] 7 siRNAs (SEQ ID NOs: 72-81) targeting the reverse complement of the Leader of SARS-CoV-2 were tested. As seen from FIG. 11A, all the tested siRNA sequences caused a reduction in mCherry+GFP/GFP+ ratio indicative of them being efficient siRNAs. A particularly impressive reduction in the ratio was observed for siRNAs leaderRC 77 (SEQ ID NO: 76), leaderRC_78 (SEQ ID NO: 77) and leaderRC 79 (SEQ ID NO: 78)—indicated by arrows. As further seen from FIG. 11B, lower concentrations of siRNA where less efficient for the tested siRNAs, but a close to 50% reduction in the mCherry+GFP/GFP+ ratio was observed for leaderRC_78 at a 500 pM concentration.

### Example 5—Validation of siRNA Efficiency—Reporter Assay in Stably Transfected Cell Lines

[0215] The reporter assay was repeated in a stably transfected cell line which enables to reliably measure fluorescence intensity and not just number of fluorescent cells and thus provide a quantitative indication of siRNA efficiency.

[0216] 4 NSP8 siRNAs were tested (NSP8_7 (SEQ ID NO: 6), NSP8_8 (SEQ ID NO: 7), NSP8_10 (SEQ ID NO: 9)) and NSP_14 (SEQ ID NO: 13) and compared to a control siRNA.

[0217] As seen from FIG. 12A and FIG. 12B, an IC50 of fluorescence was observed at a concentration of between about 50 pM and 100 pM for all four siRNAs, indicating the high efficiency of these siRNAs.

[0218] 10 additional siRNAs siRNAs targeting various regions of the SARS-COV2 genome were also tested (S1-S10) and compared to a control siRNA.

[0219] As seen from FIG. 13A and FIG. 13B, an IC50 of fluorescence was observed at a concentration of below 20 pM was observed for 5 of the siRNAs, namely S2, S3, S4, S8 and S10 indicating the high efficiency of these siRNAs.

### Example 6—Validation of siRNA Efficiency—Viral Protection qPCR Assay

[0220] Vero E6 cells (known to be easily infected by Sars-COV2) were transfected with increasing concentration of candidate siRNAs targeting various part of the of SARS-COV-2 genome, namely 51, S2, S3 and S5-S9, set forth in SEQ ID Nos: 89-91 and 93-97 (100 nM) and challenged 24h after with 600 TCID50 (¬0.1 MOI) of Sars-COV2.

[0221] 48 hours post-infection viral load was determined by qPCR Allplex™ SARS-CoV-2 Assay by Seegene using standard protocol. The subgenomic region is an average of the RNA levels of the “N” and “E” gene and the genomic region reflects the RNA levels of Orf1_ab.

[0222] As seen from FIG. 14, several siRNAs targeting SARS-CoV-2 genome caused a larger than 95% reduction in viral load namely siRNAs S2, S3, S5, S6 and S9, set forth in SEQ ID NOs: 90, 91, 93, 94 and 97, indicating the impressive ability of these siRNAs to attenuate live SARS-COV2 viruses.

[0223] Similarly, Vero E6 cells (known to be easily infected by SARS-COV2) were transfected with siRNAs targeting NSP8 and RNA dependent RNA polymerase (SEQ ID NO: 8 and 49 respectively) of SARS-COV-2 (100 nM) and challenged 24h after with 600 TCID50 (¬0.1 MOI) of SARS-COV-2.

[0224] 48 hours post-infection viral load was determined by endpoint dilution assay.

[0225] As seen from FIG. 15, the siRNA targeting NSP8 (SEQ ID NO: 7) and siRNA2 targeting RNA dependent RNA polymerase (SEQ ID NO: 48) caused a larger than 95% reduction in viral load. In particular, when a combination of the two siRNAs was utilized a more than 500-fold in viral load was observed.

### Example 7—Validation of siRNA Efficiency—Viral Load Assay

[0226] Vero E6 cells (known to be easily infected by SARS-COV-2) were transfected with siRNAs (S1, S3, S5, S9 SEQ ID NO:89, 91, 93 and 97) of Sars-COV2; the helicase (Hel_14—SEQ ID NO: 13) the Nsp8 protein (NSP8_8—SEQ ID NO: 7), the RNA dependent polymerase (Pol49- SEQ ID NO: 48), (100 nM) and after 24 h challenged with 6000 or 600 times the TCID50 of SARS-COV-2.

[0227] 48 hours post-infection remaining virus was determined by endpoint dilution assay.

[0228] As seen from FIG. 16A and FIG. 16B, the all the tested siRNAs caused a significant reduction in remaining viruses, indicating that the siRNAs recovered in the screen can be used for attenuation (preventing and/or treating Sars-COV2 infection. Significantly, providing a cocktail of siRNAs including both NSP8_8 and Pol49) essentially eliminated the virus.

### Example 8—Validation of siRNA Cocktails

[0229] Vero E6 cells (known to be easily infected by SARS-COV-2) were transfected with a cocktail of siRNAs targeting various regions of the SARS-COV2 (100 nM) and after 48 h challenged with 6000, 600 or 60 times the TCID50 of SARS-COV-2.

[0230] 48 hours post-infection remaining virus was determined by evaluation of depletion E-protein (blue/dark bars) and RNA dependent RNA polymerase (RDRP—orange/light bars) levels as compared to EGFP (indicative of transfection efficiency).

[0231] As seen from FIG. 17A-FIG. 17F, several cocktails, in particular cocktails containing siRNAs targeting S2 and S3 (SEQ ID Nos 90 and 91); S2 and S5 (SEQ ID NOs 90 and 93); S2 and S9 (SEQ ID NOs 90 and 97); S2 and Helicase (He114) (SEQ ID NOs 90 and 13); S5 and Helicase (Hel14) (SEQ ID NOs 93 and 13); and NSP8 and S9 (SEQ ID NOs: 7 and 97) were found to significantly increase virus depletion as compared to S3 only.

[0232] While certain embodiments of the invention have been illustrated and described, it will be clear that the invention is not limited to the embodiments described herein. Numerous modifications, changes, variations, substitutions and equivalents will be apparent to those skilled in the art without departing from the spirit and scope of the present invention as described by the claims, which follow.

1-43. (canceled)

44. An isolated ribonucleic acid interfering (RNAi) molecule, the RNAi molecule comprising a sequence of from about 15 to about 65 base pairs, capable of decreasing expression of a SARS-CoV-2 transcript, and wherein the RNAi molecule comprises at least one nucleotide sequence having at least 90% sequence homology to any one of SEQ ID NOs: 4, 6-9, 12, 13, 60, 83, 84, 90, 91, 93, 94 and 97.

45. The isolated RNAi molecule of claim 44, wherein the RNAi molecule comprises at least one nucleotide sequence having at least 90% sequence homology to any one of SEQ ID NO: 13; 90, 91 and 93.

46. The isolated RNAi molecule of claim 45, wherein the RNAi molecule comprises at least one nucleotide sequence having at least 90% sequence homology to any one of SEQ ID NO: 93.

47. The isolated RNAi molecule of claim 44, wherein a first strand and a second strand of the RNAi molecule comprise at least 14-25 contiguous complementary base pairs.

48. The isolated RNAi molecule of claim 47, wherein the first and the second strands comprise a 3′ single-stranded overhang.

49. The isolated RNAi molecule of claim 48, wherein the overhang comprises at least two nucleotides.

50. The isolated RNAi molecule of claim 47, wherein the first and/or the second strand comprises a nucleotide analogue.

51. The isolated RNAi molecule of claim 1, wherein the at least one nucleotide sequence has 100% sequence homology to any one of SEQ ID Nos: 4, 6-9, 12, 13, 60, 83, 84, 90, 91, 93, 94 and 97.

52. The isolated RNAi molecule of claim 1, wherein the RNAi molecule is a siRNA or a shRNA.

53. A composition comprising the one or more of the RNAi molecules of claim 44 and a suitable transport vehicle and/or carrier.

54. The composition of claim 53, comprising at least two different RNAi molecules, wherein the first strand of each of the at least two RNAi molecules has 90% sequence homology to different ones of any one of SEQ ID NO: 4, 6-9, 12, 13, 60, 83, 84, 90, 91, 93, 94 and 97.

55. The composition of claim 53, wherein at least one of the RNAi molecules has 90% sequence homology to SEQ ID NO: 90, 91, 93, 94 or 97.

56. The composition of claim 55, wherein at least one of the RNAi molecules is SEQ ID NO: 93.

57. The composition of claim 53, wherein the carrier is aqueous solution.

58. The composition of claim 53, wherein the composition is suitable for administration through aerosol.

59. The composition of claim 53, wherein the transport vehicle is a liposome or a lipid nanoparticle.

60. The composition of claim 53, formulated for oral and/or nasal administration, for administration via inhalation or for intranasal and/or intrabuccal administration.

61. A method for preventing infection, reducing viral load, attenuating and/or inhibiting spread of SARS-CoV-2 infection, the method comprising administering to a subject one or more of the RNAi molecules of claim 44.

62. The method of claim 61, wherein the subject is a subject infected with the SARS-CoV-2.

63. The method of claim 61, wherein the subject is a care-giver of a patient infected with the SARS-CoV-2 or suspected as being infected with SARS-CoV-2.

The application's sequence listing, which the Patent Office published only in electronic form, follows.

SEQUENCE LISTING (14428 sequences)

SEQ ID NO: 1 - DNA, 19 bp, Artificial Sequence
  Synthesized RNAi sequence
uuauuaauuauacugcgug

SEQ ID NO: 2 - DNA, 19 bp, Artificial Sequence
  Synthesized RNAi sequence
uucguuuagagaacagauc

SEQ ID NO: 3 - DNA, 19 bp, Artificial Sequence
  Synthesized RNAi sequence
acuaucugcaucuacaacc

SEQ ID NO: 4 - DNA, 19 bp, Artificial Sequence
  Synthesized RNAi sequence
aucaccauuagcaacagcc

SEQ ID NO: 5 - DNA, 19 bp, Artificial Sequence
  Synthesized RNAi sequence
uaaacucugaggcuauagc

SEQ ID NO: 6 - DNA, 19 bp, Artificial Sequence
  Synthesized RNAi sequence
uaaauuaggugaauugucc

SEQ ID NO: 7 - DNA, 19 bp, Artificial Sequence
  Synthesized RNAi sequence
uaagaacaacuucagaauc

SEQ ID NO: 8 - DNA, 19 bp, Artificial Sequence
  Synthesized RNAi sequence
uauacauuugggucauagc

SEQ ID NO: 9 - DNA, 19 bp, Artificial Sequence
  Synthesized RNAi sequence
uugauaauguuguugagug

SEQ ID NO: 10 - DNA, 19 bp, Artificial Sequence
  Synthesized RNAi sequence
uuuacuaucugcaucuaca

SEQ ID NO: 11 - DNA, 19 bp, Artificial Sequence
  Synthesized RNAi sequence
aaagucaguaacauuaucg

SEQ ID NO: 12 - DNA, 19 bp, Artificial Sequence
  Synthesized RNAi sequence
aauugcaaagaacacaagc

SEQ ID NO: 13 - DNA, 19 bp, Artificial Sequence
  Synthesized RNAi sequence
auugcaaagaacacaagcc

SEQ ID NO: 14 - DNA, 19 bp, Artificial Sequence
  Synthesized RNAi sequence
auuuguaaguuguuguacc

SEQ ID NO: 15 - DNA, 19 bp, Artificial Sequence
  Synthesized RNAi sequence
uaaagucaguaacauuauc

SEQ ID NO: 16 - DNA, 19 bp, Artificial Sequence
  Synthesized RNAi sequence
uaaugaagucugugaauug

SEQ ID NO: 17 - DNA, 19 bp, Artificial Sequence
  Synthesized RNAi sequence
uaauucuaacauagugcuc

SEQ ID NO: 18 - DNA, 19 bp, Artificial Sequence
  Synthesized RNAi sequence
uaauucuacuacauuuauc

SEQ ID NO: 19 - DNA, 19 bp, Artificial Sequence
  Synthesized RNAi sequence
uaauucucugucagacagc

SEQ ID NO: 20 - DNA, 19 bp, Artificial Sequence
  Synthesized RNAi sequence
uacaauaauagcucauacc

SEQ ID NO: 21 - DNA, 19 bp, Artificial Sequence
  Synthesized RNAi sequence
uacuacauuuaucuauagg

SEQ ID NO: 22 - DNA, 19 bp, Artificial Sequence
  Synthesized RNAi sequence
uuacaauaauagcucauac

SEQ ID NO: 23 - DNA, 19 bp, Artificial Sequence
  Synthesized RNAi sequence
uuacauuacaagagugagc

SEQ ID NO: 24 - DNA, 19 bp, Artificial Sequence
  RNAi sequence
uuaguuagcaaugugcgug

SEQ ID NO: 25 - DNA, 19 bp, Artificial Sequence
  Synthesized RNAi sequence
uucaagacuuguaaauugc

SEQ ID NO: 26 - DNA, 19 bp, Artificial Sequence
  RNAi sequence
uucuaacauagugcucuug

SEQ ID NO: 27 - DNA, 19 bp, Artificial Sequence
  Synthesized RNAi sequence
uugauaauuugcaacauug

SEQ ID NO: 28 - DNA, 19 bp, Artificial Sequence
  Synthesized RNAi sequence
uuuaguuacacgauaacca

SEQ ID NO: 29 - DNA, 19 bp, Artificial Sequence
  Synthesized RNAi sequence
uuucaguacagguguuagc

SEQ ID NO: 30 - DNA, 19 bp, Artificial Sequence
  Synthesized RNAi sequence
aucacauuuaggauaaucc

SEQ ID NO: 31 - DNA, 19 bp, Artificial Sequence
  Synthesized RNAi sequence
aucuugauuaucuaauguc

SEQ ID NO: 32 - DNA, 19 bp, Artificial Sequence
  Synthesized RNAi sequence
auuauguacaacaccuagc

SEQ ID NO: 33 - DNA, 19 bp, Artificial Sequence
  Synthesized RNAi sequence
uaaacuuaaagaagucaug

SEQ ID NO: 34 - DNA, 19 bp, Artificial Sequence
  Synthesized RNAi sequence
uaaagaagucauguuuagc

SEQ ID NO: 35 - DNA, 19 bp, Artificial Sequence
  Synthesized RNAi sequence
uaaauugucaucuucgucc

SEQ ID NO: 36 - DNA, 19 bp, Artificial Sequence
  Synthesized RNAi sequence
uaguacuacagauagagac

SEQ ID NO: 37 - DNA, 19 bp, Artificial Sequence
  Synthesized RNAi sequence
uaucuaaugucaguacacc

SEQ ID NO: 38 - DNA, 19 bp, Artificial Sequence
  RNAi sequence
uauguacaacaccuagcuc

SEQ ID NO: 39 - DNA, 19 bp, Artificial Sequence
  Synthesized RNAi sequence
uauugaaauaaucaucauc

SEQ ID NO: 40 - DNA, 19 bp, Artificial Sequence
  Synthesized RNAi sequence
uuaacauauagugaaccgc

SEQ ID NO: 41 - DNA, 19 bp, Artificial Sequence
  Synthesized RNAi sequence
uuaggauguuuaguaagug

SEQ ID NO: 42 - DNA, 19 bp, Artificial Sequence
  Synthesized RNAi sequence
uuaucuaaugucaguacac

SEQ ID NO: 43 - DNA, 19 bp, Artificial Sequence
  Synthesized RNAi sequence
uuauguacaacaccuagcu

SEQ ID NO: 44 - DNA, 19 bp, Artificial Sequence
  Synthesized RNAi sequence
uucuacaucacuauaaaca

SEQ ID NO: 45 - DNA, 19 bp, Artificial Sequence
  Synthesized RNAi sequence
uugaaacuacaaauggaac

SEQ ID NO: 46 - DNA, 19 bp, Artificial Sequence
  Synthesized RNAi sequence
uuuaauucaacagaacuuc

SEQ ID NO: 47 - DNA, 19 bp, Artificial Sequence
  Synthesized RNAi sequence
uuucuacaucacuauaaac

SEQ ID NO: 48 - DNA, 19 bp, Artificial Sequence
  Synthesized RNAi sequence
uuucuuggaagcgacaaca

SEQ ID NO: 49 - DNA, 19 bp, Artificial Sequence
  Synthesized RNAi sequence
auaauuauaaucagcaauc

SEQ ID NO: 50 - DNA, 19 bp, Artificial Sequence
  Synthesized RNAi sequence
auauuuaucuaacuccucc

SEQ ID NO: 51 - DNA, 19 bp, Artificial Sequence
  Synthesized RNAi sequence
uaaaguuugaaaccuagug

SEQ ID NO: 52 - DNA, 19 bp, Artificial Sequence
  Synthesized RNAi sequence
uaacaagcguguuuaaagc

SEQ ID NO: 53 - DNA, 19 bp, Artificial Sequence
  Synthesized RNAi sequence
uaacacacugacuagagac

SEQ ID NO: 54 - DNA, 19 bp, Artificial Sequence
  Synthesized RNAi sequence
uaagauuaacacacugacu

SEQ ID NO: 55 - DNA, 19 bp, Artificial Sequence
  Synthesized RNAi sequence
uaauauuaggaaaucuaac

SEQ ID NO: 56 - DNA, 19 bp, Artificial Sequence
  Synthesized RNAi sequence
uaauuaauuguugagucac

SEQ ID NO: 57 - DNA, 19 bp, Artificial Sequence
  Synthesized RNAi sequence
uaauuuaguaggagacacu

SEQ ID NO: 58 - DNA, 19 bp, Artificial Sequence
  Synthesized RNAi sequence
uagacucaguaagaacacc

SEQ ID NO: 59 - DNA, 19 bp, Artificial Sequence
  Synthesized RNAi sequence
uauauaggacagaauaauc

SEQ ID NO: 60 - DNA, 19 bp, Artificial Sequence
  Synthesized RNAi sequence
uaucaaaccucuuaguacc

SEQ ID NO: 61 - DNA, 19 bp, Artificial Sequence
  Synthesized RNAi sequence
uaucaauuugcacuucagc

SEQ ID NO: 62 - DNA, 19 bp, Artificial Sequence
  Synthesized RNAi sequence
ucgaaucuaaaguaguacc

SEQ ID NO: 63 - DNA, 19 bp, Artificial Sequence
  Synthesized RNAi sequence
uuaauuuaguaggagacac

SEQ ID NO: 64 - DNA, 19 bp, Artificial Sequence
  Synthesized RNAi sequence
uuagacucaguaagaacac

SEQ ID NO: 65 - DNA, 19 bp, Artificial Sequence
  Synthesized RNAi sequence
uuagucugagucugauaac

SEQ ID NO: 66 - DNA, 19 bp, Artificial Sequence
  Synthesized RNAi sequence
uuaucaaaccucuuaguac

SEQ ID NO: 67 - DNA, 19 bp, Artificial Sequence
  Synthesized RNAi sequence
uuauuagaguaagcaacug

SEQ ID NO: 68 - DNA, 19 bp, Artificial Sequence
  Synthesized RNAi sequence
uuauuauguuagacuucuc

SEQ ID NO: 69 - DNA, 19 bp, Artificial Sequence
  Synthesized RNAi sequence
uuguaagauuaacacacug

SEQ ID NO: 70 - DNA, 19 bp, Artificial Sequence
  Synthesized RNAi sequence
uuuaucuaacuccuccuug

SEQ ID NO: 71 - DNA, 19 bp, Artificial Sequence
  Synthesized RNAi sequence
uuuguaaauuuguuugacu

SEQ ID NO: 72 - DNA, 19 bp, Artificial Sequence
  Synthesized RNAi sequence
caacuuucgaucucuugua

SEQ ID NO: 73 - DNA, 19 bp, Artificial Sequence
  Synthesized RNAi sequence
cuuguagaucuguucucua

SEQ ID NO: 74 - DNA, 19 bp, Artificial Sequence
  Synthesized RNAi sequence
gguaacaaaccaaccaacu

SEQ ID NO: 75 - DNA, 19 bp, Artificial Sequence
  Synthesized RNAi sequence
guaacaaaccaaccaacuu

SEQ ID NO: 76 - DNA, 19 bp, Artificial Sequence
  Synthesized RNAi sequence
uaacaaaccaaccaacuuu

SEQ ID NO: 77 - DNA, 19 bp, Artificial Sequence
  Synthesized RNAi sequence
ucuuguagaucuguucucu

SEQ ID NO: 78 - DNA, 19 bp, Artificial Sequence
  Synthesized RNAi sequence
uguagaucuguucucuaaa

SEQ ID NO: 79 - DNA, 20 bp, Artificial Sequence
  Synthesized RNAi sequence
uuaguuauuaauuauacugc

SEQ ID NO: 80 - DNA, 20 bp, Artificial Sequence
  Synthesized RNAi sequence
uuaucuaguaauagauuacc

SEQ ID NO: 81 - DNA, 20 bp, Artificial Sequence
  Synthesized RNAi sequence
uucauuugaguuauaguagg

SEQ ID NO: 82 - DNA, 20 bp, Artificial Sequence
  Synthesized RNAi sequence
uuagcuaaaauguaaucacc

SEQ ID NO: 83 - DNA, 20 bp, Artificial Sequence
  Synthesized RNAi sequence
uuaucaaaccucuuaguacc

SEQ ID NO: 84 - DNA, 20 bp, Artificial Sequence
  Synthesized RNAi sequence
uuauguuagacuucucagug

SEQ ID NO: 85 - DNA, 20 bp, Artificial Sequence
  Synthesized RNAi sequence
ucuaauuacaaaugaaucug

SEQ ID NO: 86 - DNA, 20 bp, Artificial Sequence
  Synthesized RNAi sequence
uucaguugaaauaucucucu

SEQ ID NO: 87 - DNA, 20 bp, Artificial Sequence
  Synthesized RNAi sequence
uuuguugaaaaguagaucuu

SEQ ID NO: 88 - DNA, 20 bp, Artificial Sequence
  Synthesized RNAi sequence
uugagcaaucauuucaucug

SEQ ID NO: 89 - DNA, 22 bp, Artificial Sequence
  Synthesized RNAi sequence
ttaaaacacctaaagcagcggt

SEQ ID NO: 90 - DNA, 22 bp, Artificial Sequence
  Synthesized RNAi sequence
ttcataagcaacagaaccttct

SEQ ID NO: 91 - DNA, 22 bp, Artificial Sequence
  Synthesized RNAi sequence
taagcaactgaattttctgcac

SEQ ID NO: 92 - DNA, 22 bp, Artificial Sequence
  Synthesized RNAi sequence
tttagtagcagcaagattagca

SEQ ID NO: 93 - DNA, 22 bp, Artificial Sequence
  Synthesized RNAi sequence
ttaggtgaaactgatctggcac

SEQ ID NO: 94 - DNA, 22 bp, Artificial Sequence
  Synthesized RNAi sequence
taaaagtgcattaacattggcc

SEQ ID NO: 95 - DNA, 22 bp, Artificial Sequence
  Synthesized RNAi sequence
aaggtcagtctcagtccaacat

SEQ ID NO: 96 - DNA, 22 bp, Artificial Sequence
  Synthesized RNAi sequence
tacattacacataaacgaactt

SEQ ID NO: 97 - DNA, 22 bp, Artificial Sequence
  Synthesized RNAi sequence
ttggccttgttgttgttggcct

SEQ ID NO: 98 - DNA, 22 bp, Artificial Sequence
  Synthesized RNAi sequence
tacgagggcaattcaccatttc

SEQ ID NO: 99 - DNA, 24 bp, Artificial Sequence
  Synthesized RNAi sequence
auugcaaagaacacaagccccauu

SEQ ID NO: 100 - RNA, 19 nt, Artificial Sequence
  Synthesized RNAi sequence
aaacacuauuagcauaagc

SEQ ID NO: 101 - RNA, 19 nt, Artificial Sequence
  Synthesized RNAi sequence
aaacacuauuagcauaagc

SEQ ID NO: 102 - RNA, 19 nt, Artificial Sequence
  Synthesized RNAi sequence
aaacacuugaaauugcacc

SEQ ID NO: 103 - RNA, 19 nt, Artificial Sequence
  Synthesized RNAi sequence
aaacaguuaacacaauuug

SEQ ID NO: 104 - RNA, 19 nt, Artificial Sequence
  Synthesized RNAi sequence
aaacaguuaacacaauuug

SEQ ID NO: 105 - RNA, 19 nt, Artificial Sequence
  Synthesized RNAi sequence
aaacucugaacucacuuuc

SEQ ID NO: 106 - RNA, 19 nt, Artificial Sequence
  Synthesized RNAi sequence
aaacugugacucuucuucc

SEQ ID NO: 107 - RNA, 19 nt, Artificial Sequence
  Synthesized RNAi sequence
aaacugugacucuucuucc

SEQ ID NO: 108 - RNA, 19 nt, Artificial Sequence
  Synthesized RNAi sequence
aaagaaaguacuacuacuc

SEQ ID NO: 109 - RNA, 19 nt, Artificial Sequence
  Synthesized RNAi sequence
aaagaaugucugaacacuc

SEQ ID NO: 110 - RNA, 19 nt, Artificial Sequence
  Synthesized RNAi sequence
aaagacaucagcauacucc

SEQ ID NO: 111 - RNA, 19 nt, Artificial Sequence
  Synthesized RNAi sequence
aaagacaucagcauacucc

SEQ ID NO: 112 - RNA, 19 nt, Artificial Sequence
  Synthesized RNAi sequence
aaagauguaauucucuguc

SEQ ID NO: 113 - RNA, 19 nt, Artificial Sequence
  Synthesized RNAi sequence
aaagucaccaacaauauug

SEQ ID NO: 114 - RNA, 19 nt, Artificial Sequence
  Synthesized RNAi sequence
aaagucaguaacauuaucg

SEQ ID NO: 115 - RNA, 19 nt, Artificial Sequence
  Synthesized RNAi sequence
aaaucuuugaggcuacagc

SEQ ID NO: 116 - RNA, 19 nt, Artificial Sequence
  Synthesized RNAi sequence
aaauugaucguacaacacg

SEQ ID NO: 117 - RNA, 19 nt, Artificial Sequence
  Synthesized RNAi sequence
aaauuguacauucagcagc

SEQ ID NO: 118 - RNA, 19 nt, Artificial Sequence
  Synthesized RNAi sequence
aacaacagcaucaccauag

SEQ ID NO: 119 - RNA, 19 nt, Artificial Sequence
  Synthesized RNAi sequence
aacaacugguguaaguucc

SEQ ID NO: 120 - RNA, 19 nt, Artificial Sequence
  Synthesized RNAi sequence
aacaaugcugcaaucgugc

SEQ ID NO: 121 - RNA, 19 nt, Artificial Sequence
  Synthesized RNAi sequence
aacaaugcugcaaucgugc

SEQ ID NO: 122 - RNA, 19 nt, Artificial Sequence
  Synthesized RNAi sequence
aacacuuugcuucacacuc

SEQ ID NO: 123 - RNA, 19 nt, Artificial Sequence
  Synthesized RNAi sequence
aacagugcaaguacaaacc

SEQ ID NO: 124 - RNA, 19 nt, Artificial Sequence
  Synthesized RNAi sequence
aacaucucuauuucuauag

SEQ ID NO: 125 - RNA, 19 nt, Artificial Sequence
  Synthesized RNAi sequence
aacaucucuauuucuauag

SEQ ID NO: 126 - RNA, 19 nt, Artificial Sequence
  Synthesized RNAi sequence
aacaucuuaacacaauuag

SEQ ID NO: 127 - RNA, 19 nt, Artificial Sequence
  Synthesized RNAi sequence
aacauuaccagccuguacc

SEQ ID NO: 128 - RNA, 19 nt, Artificial Sequence
  Synthesized RNAi sequence
aaccaauuuaugaugaacc

SEQ ID NO: 129 - RNA, 19 nt, Artificial Sequence
  Synthesized RNAi sequence
aaccauuaaggaaugaacc

SEQ ID NO: 130 - RNA, 19 nt, Artificial Sequence
  Synthesized RNAi sequence
aaccuguagaauaaacacg

SEQ ID NO: 131 - RNA, 19 nt, Artificial Sequence
  Synthesized RNAi sequence
aacuguagugacaagucuc

SEQ ID NO: 132 - RNA, 19 nt, Artificial Sequence
  Synthesized RNAi sequence
aacuucuaacuuuagaguc

SEQ ID NO: 133 - RNA, 19 nt, Artificial Sequence
  Synthesized RNAi sequence
aacuuuaaucucacauagc

SEQ ID NO: 134 - RNA, 19 nt, Artificial Sequence
  Synthesized RNAi sequence
aacuuuaaucucacauagc

SEQ ID NO: 135 - RNA, 19 nt, Artificial Sequence
  Synthesized RNAi sequence
aagaacuucacaacugcuc

SEQ ID NO: 136 - RNA, 19 nt, Artificial Sequence
  Synthesized RNAi sequence
aagaagaaguaagauaacc

SEQ ID NO: 137 - RNA, 19 nt, Artificial Sequence
  Synthesized RNAi sequence
aagacuuguaaauugcaac

SEQ ID NO: 138 - RNA, 19 nt, Artificial Sequence
  Synthesized RNAi sequence
aagaguuucauuuagaucg

SEQ ID NO: 139 - RNA, 19 nt, Artificial Sequence
  Synthesized RNAi sequence
aagcauaacagaauacaug

SEQ ID NO: 140 - RNA, 19 nt, Artificial Sequence
  Synthesized RNAi sequence
aagcauaacagaauacaug

SEQ ID NO: 141 - RNA, 19 nt, Artificial Sequence
  Synthesized RNAi sequence
aaggaaucuaucaaacuuc

SEQ ID NO: 142 - RNA, 19 nt, Artificial Sequence
  Synthesized RNAi sequence
aaguacuaaaggaaacacc

SEQ ID NO: 143 - RNA, 19 nt, Artificial Sequence
  Synthesized RNAi sequence
aagucaacugaacaacacc

SEQ ID NO: 144 - RNA, 19 nt, Artificial Sequence
  Synthesized RNAi sequence
aagugcaugaagcuuuacc

SEQ ID NO: 145 - RNA, 19 nt, Artificial Sequence
  Synthesized RNAi sequence
aauaacuucuauguaaagc

SEQ ID NO: 146 - RNA, 19 nt, Artificial Sequence
  Synthesized RNAi sequence
aauaauaagaaucuacaac

SEQ ID NO: 147 - RNA, 19 nt, Artificial Sequence
  Synthesized RNAi sequence
aauaauaagaaucuacaac

SEQ ID NO: 148 - RNA, 19 nt, Artificial Sequence
  Synthesized RNAi sequence
aauacuucacuuuaggacc

SEQ ID NO: 149 - RNA, 19 nt, Artificial Sequence
  Synthesized RNAi sequence
aauauuacaaacuugugcc

SEQ ID NO: 150 - RNA, 19 nt, Artificial Sequence
  Synthesized RNAi sequence
aauauuuaucuaacuccuc

SEQ ID NO: 151 - RNA, 19 nt, Artificial Sequence
  Synthesized RNAi sequence
aaucauaauaaagucuagc

SEQ ID NO: 152 - RNA, 19 nt, Artificial Sequence
  Synthesized RNAi sequence
aaucauaauaaagucuagc

SEQ ID NO: 153 - RNA, 19 nt, Artificial Sequence
  Synthesized RNAi sequence
aaucgauugagaaaccacc

SEQ ID NO: 154 - RNA, 19 nt, Artificial Sequence
  Synthesized RNAi sequence
aaucuaucaaacuucuaac

SEQ ID NO: 155 - RNA, 19 nt, Artificial Sequence
  Synthesized RNAi sequence
aaucuuacaaccagaacuc

SEQ ID NO: 156 - RNA, 19 nt, Artificial Sequence
  Synthesized RNAi sequence
aaucuuuguaagcuuuagc

SEQ ID NO: 157 - RNA, 19 nt, Artificial Sequence
  Synthesized RNAi sequence
aauguaacacaagcuuucg

SEQ ID NO: 158 - RNA, 19 nt, Artificial Sequence
  Synthesized RNAi sequence
aauguaacacaagcuuucg

SEQ ID NO: 159 - RNA, 19 nt, Artificial Sequence
  Synthesized RNAi sequence
aaugucuccuacaacuucg

SEQ ID NO: 160 - RNA, 19 nt, Artificial Sequence
  Synthesized RNAi sequence
aauuaaauugucaucuucg

SEQ ID NO: 161 - RNA, 19 nt, Artificial Sequence
  Synthesized RNAi sequence
aauuaaauugucaucuucg

SEQ ID NO: 162 - RNA, 19 nt, Artificial Sequence
  Synthesized RNAi sequence
aauuauuaaccacauaagc

SEQ ID NO: 163 - RNA, 19 nt, Artificial Sequence
  Synthesized RNAi sequence
aauucauauaucuaaacuc

SEQ ID NO: 164 - RNA, 19 nt, Artificial Sequence
  Synthesized RNAi sequence
aauucuaacauagugcucu

SEQ ID NO: 165 - RNA, 19 nt, Artificial Sequence
  Synthesized RNAi sequence
aauucuacuacauuuaucu

SEQ ID NO: 166 - RNA, 19 nt, Artificial Sequence
  Synthesized RNAi sequence
aauugcaaagaacacaagc

SEQ ID NO: 167 - RNA, 19 nt, Artificial Sequence
  Synthesized RNAi sequence
aauuggaacuguaacuuug

SEQ ID NO: 168 - RNA, 19 nt, Artificial Sequence
  Synthesized RNAi sequence
acaaccgucuacaacaugc

SEQ ID NO: 169 - RNA, 19 nt, Artificial Sequence
  Synthesized RNAi sequence
acaagauuaauuauuaacc

SEQ ID NO: 170 - RNA, 19 nt, Artificial Sequence
  Synthesized RNAi sequence
acuaacauucuucucaacg

SEQ ID NO: 171 - RNA, 19 nt, Artificial Sequence
  Synthesized RNAi sequence
acuaucugcaucuacaacc

SEQ ID NO: 172 - RNA, 19 nt, Artificial Sequence
  Synthesized RNAi sequence
acuaucugcaucuacaacc

SEQ ID NO: 173 - RNA, 19 nt, Artificial Sequence
  Synthesized RNAi sequence
agaacuucacaacugcucc

SEQ ID NO: 174 - RNA, 19 nt, Artificial Sequence
  Synthesized RNAi sequence
agauucuugacauuacacc

SEQ ID NO: 175 - RNA, 19 nt, Artificial Sequence
  Synthesized RNAi sequence
aguaacaucagcuccaucc

SEQ ID NO: 176 - RNA, 19 nt, Artificial Sequence
  Synthesized RNAi sequence
aguaauucuaacauagugc

SEQ ID NO: 177 - RNA, 19 nt, Artificial Sequence
  Synthesized RNAi sequence
aguaguugucugauugucc

SEQ ID NO: 178 - RNA, 19 nt, Artificial Sequence
  Synthesized RNAi sequence
auaaacuagcauuauacac

SEQ ID NO: 179 - RNA, 19 nt, Artificial Sequence
  Synthesized RNAi sequence
auaaagaacagcaaccugg

SEQ ID NO: 180 - RNA, 19 nt, Artificial Sequence
  Synthesized RNAi sequence
auaaagucuagccuuaccc

SEQ ID NO: 181 - RNA, 19 nt, Artificial Sequence
  Synthesized RNAi sequence
auaaagucuagccuuaccc

SEQ ID NO: 182 - RNA, 19 nt, Artificial Sequence
  Synthesized RNAi sequence
auaaauuuaacaauuuccc

SEQ ID NO: 183 - RNA, 19 nt, Artificial Sequence
  Synthesized RNAi sequence
auaacagcagcguacaacc

SEQ ID NO: 184 - RNA, 19 nt, Artificial Sequence
  Synthesized RNAi sequence
auaagcaacagaaccuucu

SEQ ID NO: 185 - RNA, 19 nt, Artificial Sequence
  Synthesized RNAi sequence
auaauaagaaucuacaaca

SEQ ID NO: 186 - RNA, 19 nt, Artificial Sequence
  Synthesized RNAi sequence
auaauaagaaucuacaaca

SEQ ID NO: 187 - RNA, 19 nt, Artificial Sequence
  Synthesized RNAi sequence
auaaucauuguuaaguacc

SEQ ID NO: 188 - RNA, 19 nt, Artificial Sequence
  Synthesized RNAi sequence
auaaugaaacuugucacgc

SEQ ID NO: 189 - RNA, 19 nt, Artificial Sequence
  Synthesized RNAi sequence
auaauuaguacaaacacgg

SEQ ID NO: 190 - RNA, 19 nt, Artificial Sequence
  Synthesized RNAi sequence
auaauuauaaucagcaauc

SEQ ID NO: 191 - RNA, 19 nt, Artificial Sequence
  Synthesized RNAi sequence
auaauuguacuucauagcc

SEQ ID NO: 192 - RNA, 19 nt, Artificial Sequence
  Synthesized RNAi sequence
auaauuguccaacuuaggg

SEQ ID NO: 193 - RNA, 19 nt, Artificial Sequence
  Synthesized RNAi sequence
auacaauguaacacaagcu

SEQ ID NO: 194 - RNA, 19 nt, Artificial Sequence
  Synthesized RNAi sequence
auacaauguaacacaagcu

SEQ ID NO: 195 - RNA, 19 nt, Artificial Sequence
  Synthesized RNAi sequence
auagaugucaacucaaagc

SEQ ID NO: 196 - RNA, 19 nt, Artificial Sequence
  Synthesized RNAi sequence
auagauuaccagaagcagc

SEQ ID NO: 197 - RNA, 19 nt, Artificial Sequence
  Synthesized RNAi sequence
auagauuaccagaagcagc

SEQ ID NO: 198 - RNA, 19 nt, Artificial Sequence
  Synthesized RNAi sequence
auaguagucauaaucgcug

SEQ ID NO: 199 - RNA, 19 nt, Artificial Sequence
  Synthesized RNAi sequence
auaguagucauaaucgcug

SEQ ID NO: 200 - RNA, 19 nt, Artificial Sequence
  Synthesized RNAi sequence
auaguuaauagcguacuuc

SEQ ID NO: 201 - RNA, 19 nt, Artificial Sequence
  Synthesized RNAi sequence
auauaagcaauuguuaucc

SEQ ID NO: 202 - RNA, 19 nt, Artificial Sequence
  Synthesized RNAi sequence
auauagucuacucuugugc

SEQ ID NO: 203 - RNA, 19 nt, Artificial Sequence
  Synthesized RNAi sequence
auauagucuacucuugugc

SEQ ID NO: 204 - RNA, 19 nt, Artificial Sequence
  Synthesized RNAi sequence
auauauucuaagcacacgc

SEQ ID NO: 205 - RNA, 19 nt, Artificial Sequence
  Synthesized RNAi sequence
auauuuaucuaacuccucc

SEQ ID NO: 206 - RNA, 19 nt, Artificial Sequence
  Synthesized RNAi sequence
aucaauuugcacuucagcc

SEQ ID NO: 207 - RNA, 19 nt, Artificial Sequence
  Synthesized RNAi sequence
aucacauuuaggauaaucc

SEQ ID NO: 208 - RNA, 19 nt, Artificial Sequence
  Synthesized RNAi sequence
aucacauuuaggauaaucc

SEQ ID NO: 209 - RNA, 19 nt, Artificial Sequence
  Synthesized RNAi sequence
aucaccauuagcaacagcc

SEQ ID NO: 210 - RNA, 19 nt, Artificial Sequence
  Synthesized RNAi sequence
aucaccauuagcaacagcc

SEQ ID NO: 211 - RNA, 19 nt, Artificial Sequence
  Synthesized RNAi sequence
aucaccuucuucuucaucc

SEQ ID NO: 212 - RNA, 19 nt, Artificial Sequence
  Synthesized RNAi sequence
aucauaaacaccaagaguc

SEQ ID NO: 213 - RNA, 19 nt, Artificial Sequence
  Synthesized RNAi sequence
aucauaauaaagucuagcc

SEQ ID NO: 214 - RNA, 19 nt, Artificial Sequence
  Synthesized RNAi sequence
aucauaauaaagucuagcc

SEQ ID NO: 215 - RNA, 19 nt, Artificial Sequence
  Synthesized RNAi sequence
aucaucacaacuguagcug

SEQ ID NO: 216 - RNA, 19 nt, Artificial Sequence
  Synthesized RNAi sequence
aucaucacaacuguagcug

SEQ ID NO: 217 - RNA, 19 nt, Artificial Sequence
  Synthesized RNAi sequence
aucaucagauucaacuugc

SEQ ID NO: 218 - RNA, 19 nt, Artificial Sequence
  Synthesized RNAi sequence
aucaucaucacaacaauug

SEQ ID NO: 219 - RNA, 19 nt, Artificial Sequence
  Synthesized RNAi sequence
aucaucaucacaacaauug

SEQ ID NO: 220 - RNA, 19 nt, Artificial Sequence
  Synthesized RNAi sequence
aucaucuaaccaaucuucu

SEQ ID NO: 221 - RNA, 19 nt, Artificial Sequence
  Synthesized RNAi sequence
aucuugauccucauaacuc

SEQ ID NO: 222 - RNA, 19 nt, Artificial Sequence
  Synthesized RNAi sequence
aucuugauccucauaacuc

SEQ ID NO: 223 - RNA, 19 nt, Artificial Sequence
  Synthesized RNAi sequence
aucuugauuaucuaauguc

SEQ ID NO: 224 - RNA, 19 nt, Artificial Sequence
  Synthesized RNAi sequence
aucuugauuaucuaauguc

SEQ ID NO: 225 - RNA, 19 nt, Artificial Sequence
  Synthesized RNAi sequence
augaagucagacaaaucgc

SEQ ID NO: 226 - RNA, 19 nt, Artificial Sequence
  Synthesized RNAi sequence
augaauaauaagaaucuac

SEQ ID NO: 227 - RNA, 19 nt, Artificial Sequence
  Synthesized RNAi sequence
augaauaauaagaaucuac

SEQ ID NO: 228 - RNA, 19 nt, Artificial Sequence
  Synthesized RNAi sequence
augcagaucaacuuacucc

SEQ ID NO: 229 - RNA, 19 nt, Artificial Sequence
  Synthesized RNAi sequence
augcauacauaacacaguc

SEQ ID NO: 230 - RNA, 19 nt, Artificial Sequence
  Synthesized RNAi sequence
augcuuuauaauccaaacc

SEQ ID NO: 231 - RNA, 19 nt, Artificial Sequence
  Synthesized RNAi sequence
auguacaacaccuagcucu

SEQ ID NO: 232 - RNA, 19 nt, Artificial Sequence
  Synthesized RNAi sequence
auguacaacaccuagcucu

SEQ ID NO: 233 - RNA, 19 nt, Artificial Sequence
  Synthesized RNAi sequence
auguaguuaacuuuaaucu

SEQ ID NO: 234 - RNA, 19 nt, Artificial Sequence
  Synthesized RNAi sequence
auguaguuaacuuuaaucu

SEQ ID NO: 235 - RNA, 19 nt, Artificial Sequence
  Synthesized RNAi sequence
auguugaaacaaguaacuc

SEQ ID NO: 236 - RNA, 19 nt, Artificial Sequence
  Synthesized RNAi sequence
auuaacaccaauagcaguc

SEQ ID NO: 237 - RNA, 19 nt, Artificial Sequence
  Synthesized RNAi sequence
auuaacaccaauagcaguc

SEQ ID NO: 238 - RNA, 19 nt, Artificial Sequence
  Synthesized RNAi sequence
auuaacaucacuagguuuc

SEQ ID NO: 239 - RNA, 19 nt, Artificial Sequence
  Synthesized RNAi sequence
auuaaguacuuuaucaauc

SEQ ID NO: 240 - RNA, 19 nt, Artificial Sequence
  Synthesized RNAi sequence
auuaauugacuucuauuug

SEQ ID NO: 241 - RNA, 19 nt, Artificial Sequence
  Synthesized RNAi sequence
auuacauuacacauaaacg

SEQ ID NO: 242 - RNA, 19 nt, Artificial Sequence
  Synthesized RNAi sequence
auuaguaacacuacagcug

SEQ ID NO: 243 - RNA, 19 nt, Artificial Sequence
  Synthesized RNAi sequence
auuauaauuaccaccaacc

SEQ ID NO: 244 - RNA, 19 nt, Artificial Sequence
  Synthesized RNAi sequence
auuauaauuauaaauuacc

SEQ ID NO: 245 - RNA, 19 nt, Artificial Sequence
  Synthesized RNAi sequence
auuauccaacuuucuaagc

SEQ ID NO: 246 - RNA, 19 nt, Artificial Sequence
  Synthesized RNAi sequence
auuauccaacuuucuaagc

SEQ ID NO: 247 - RNA, 19 nt, Artificial Sequence
  Synthesized RNAi sequence
auuauguacaacaccuagc

SEQ ID NO: 248 - RNA, 19 nt, Artificial Sequence
  Synthesized RNAi sequence
auuauguacaacaccuagc

SEQ ID NO: 249 - RNA, 19 nt, Artificial Sequence
  Synthesized RNAi sequence
auuauuaaccacauaagcc

SEQ ID NO: 250 - RNA, 19 nt, Artificial Sequence
  Synthesized RNAi sequence
auucaguacaucgauaucg

SEQ ID NO: 251 - RNA, 19 nt, Artificial Sequence
  Synthesized RNAi sequence
auucaguacaucgauaucg

SEQ ID NO: 252 - RNA, 19 nt, Artificial Sequence
  Synthesized RNAi sequence
auucauauaucuaaacucc

SEQ ID NO: 253 - RNA, 19 nt, Artificial Sequence
  Synthesized RNAi sequence
auucuaacaaucuugauuc

SEQ ID NO: 254 - RNA, 19 nt, Artificial Sequence
  Synthesized RNAi sequence
auucucguaacuacauagc

SEQ ID NO: 255 - RNA, 19 nt, Artificial Sequence
  Synthesized RNAi sequence
auucucguaacuacauagc

SEQ ID NO: 256 - RNA, 19 nt, Artificial Sequence
  Synthesized RNAi sequence
auugcaaagaacacaagcc

SEQ ID NO: 257 - RNA, 19 nt, Artificial Sequence
  Synthesized RNAi sequence
auugcugacacuacugaug

SEQ ID NO: 258 - RNA, 19 nt, Artificial Sequence
  Synthesized RNAi sequence
auuguaacaagcuaacacu

SEQ ID NO: 259 - RNA, 19 nt, Artificial Sequence
  Synthesized RNAi sequence
auugucuacauaagcagcc

SEQ ID NO: 260 - RNA, 19 nt, Artificial Sequence
  Synthesized RNAi sequence
auuguuucucuaacaucac

SEQ ID NO: 261 - RNA, 19 nt, Artificial Sequence
  Synthesized RNAi sequence
auuguuugaauaguaguug

SEQ ID NO: 262 - RNA, 19 nt, Artificial Sequence
  Synthesized RNAi sequence
auuuaagacauucaacaac

SEQ ID NO: 263 - RNA, 19 nt, Artificial Sequence
  Synthesized RNAi sequence
auuucgagcaacauaagcc

SEQ ID NO: 264 - RNA, 19 nt, Artificial Sequence
  Synthesized RNAi sequence
auuucugaacaugacuacc

SEQ ID NO: 265 - RNA, 19 nt, Artificial Sequence
  Synthesized RNAi sequence
auuucuguacaaacaacac

SEQ ID NO: 266 - RNA, 19 nt, Artificial Sequence
  Synthesized RNAi sequence
auuuguaaguuguuguacc

SEQ ID NO: 267 - RNA, 19 nt, Artificial Sequence
  Synthesized RNAi sequence
auuuguacaaucuuuauac

SEQ ID NO: 268 - RNA, 19 nt, Artificial Sequence
  Synthesized RNAi sequence
uaaacaccguguaacuaug

SEQ ID NO: 269 - RNA, 19 nt, Artificial Sequence
  Synthesized RNAi sequence
uaaacauguuaggguaacc

SEQ ID NO: 270 - RNA, 19 nt, Artificial Sequence
  Synthesized RNAi sequence
uaaaccaaagcacucacag

SEQ ID NO: 271 - RNA, 19 nt, Artificial Sequence
  Synthesized RNAi sequence
uaaaccacuaagacaaaca

SEQ ID NO: 272 - RNA, 19 nt, Artificial Sequence
  Synthesized RNAi sequence
uaaaccaugaguagcaagg

SEQ ID NO: 273 - RNA, 19 nt, Artificial Sequence
  Synthesized RNAi sequence
uaaacuacgucaucaagcc

SEQ ID NO: 274 - RNA, 19 nt, Artificial Sequence
  Synthesized RNAi sequence
uaaacucaccagacucauc

SEQ ID NO: 275 - RNA, 19 nt, Artificial Sequence
  Synthesized RNAi sequence
uaaacucugaggcuauagc

SEQ ID NO: 276 - RNA, 19 nt, Artificial Sequence
  Synthesized RNAi sequence
uaaacucugaggcuauagc

SEQ ID NO: 277 - RNA, 19 nt, Artificial Sequence
  Synthesized RNAi sequence
uaaacuuaaagaagucaug

SEQ ID NO: 278 - RNA, 19 nt, Artificial Sequence
  Synthesized RNAi sequence
uaaacuuaaagaagucaug

SEQ ID NO: 279 - RNA, 19 nt, Artificial Sequence
  Synthesized RNAi sequence
uaaacuuucauaagcaaca

SEQ ID NO: 280 - RNA, 19 nt, Artificial Sequence
  Synthesized RNAi sequence
uaaagaaacccuuagacac

SEQ ID NO: 281 - RNA, 19 nt, Artificial Sequence
  Synthesized RNAi sequence
uaaagaaacccuuagacac

SEQ ID NO: 282 - RNA, 19 nt, Artificial Sequence
  Synthesized RNAi sequence
uaaagaacaucagaaccug

SEQ ID NO: 283 - RNA, 19 nt, Artificial Sequence
  Synthesized RNAi sequence
uaaagaaccaauagaaaug

SEQ ID NO: 284 - RNA, 19 nt, Artificial Sequence
  Synthesized RNAi sequence
uaaagaagucauguuuagc

SEQ ID NO: 285 - RNA, 19 nt, Artificial Sequence
  Synthesized RNAi sequence
uaaagaagucauguuuagc

SEQ ID NO: 286 - RNA, 19 nt, Artificial Sequence
  Synthesized RNAi sequence
uaaagaaugucugaacacu

SEQ ID NO: 287 - RNA, 19 nt, Artificial Sequence
  Synthesized RNAi sequence
uaaagcacuacccaauaug

SEQ ID NO: 288 - RNA, 19 nt, Artificial Sequence
  Synthesized RNAi sequence
uaaaggugugaacauaacc

SEQ ID NO: 289 - RNA, 19 nt, Artificial Sequence
  Synthesized RNAi sequence
uaaaguauuaaaggcaacu

SEQ ID NO: 290 - RNA, 19 nt, Artificial Sequence
  Synthesized RNAi sequence
uaaagucaguaacauuauc

SEQ ID NO: 291 - RNA, 19 nt, Artificial Sequence
  Synthesized RNAi sequence
uaaaguucuuuaugcuagc

SEQ ID NO: 292 - RNA, 19 nt, Artificial Sequence
  Synthesized RNAi sequence
uaaaguucuuuaugcuagc

SEQ ID NO: 293 - RNA, 19 nt, Artificial Sequence
  Synthesized RNAi sequence
uaaaguuugaaaccuagug

SEQ ID NO: 294 - RNA, 19 nt, Artificial Sequence
  Synthesized RNAi sequence
uaaauaacagaauaaacac

SEQ ID NO: 295 - RNA, 19 nt, Artificial Sequence
  Synthesized RNAi sequence
uaaaucaucagcaaauuug

SEQ ID NO: 296 - RNA, 19 nt, Artificial Sequence
  Synthesized RNAi sequence
uaaaucuucauaauuaggg

SEQ ID NO: 297 - RNA, 19 nt, Artificial Sequence
  Synthesized RNAi sequence
uaaaugauauccuuucacg

SEQ ID NO: 298 - RNA, 19 nt, Artificial Sequence
  Synthesized RNAi sequence
uaaaugaucucugcuuuac

SEQ ID NO: 299 - RNA, 19 nt, Artificial Sequence
  Synthesized RNAi sequence
uaaauuaaaugaucucugc

SEQ ID NO: 300 - RNA, 19 nt, Artificial Sequence
  Synthesized RNAi sequence
uaaauuaauaggcgugugc

SEQ ID NO: 301 - RNA, 19 nt, Artificial Sequence
  Synthesized RNAi sequence
uaaauuaggugaauugucc

SEQ ID NO: 302 - RNA, 19 nt, Artificial Sequence
  Synthesized RNAi sequence
uaaauuaggugaauugucc

SEQ ID NO: 303 - RNA, 19 nt, Artificial Sequence
  Synthesized RNAi sequence
uaaauugucaucuucgucc

SEQ ID NO: 304 - RNA, 19 nt, Artificial Sequence
  Synthesized RNAi sequence
uaaauugucaucuucgucc

SEQ ID NO: 305 - RNA, 19 nt, Artificial Sequence
  Synthesized RNAi sequence
uaaauuuguuugacuugug

SEQ ID NO: 306 - RNA, 19 nt, Artificial Sequence
  Synthesized RNAi sequence
uaacaaauuugcacugacu

SEQ ID NO: 307 - RNA, 19 nt, Artificial Sequence
  Synthesized RNAi sequence
uaacaagcguguuuaaagc

SEQ ID NO: 308 - RNA, 19 nt, Artificial Sequence
  Synthesized RNAi sequence
uaacaaucuugauucuaag

SEQ ID NO: 309 - RNA, 19 nt, Artificial Sequence
  Synthesized RNAi sequence
uaacaaugcugcaaucgug

SEQ ID NO: 310 - RNA, 19 nt, Artificial Sequence
  Synthesized RNAi sequence
uaacaaugcugcaaucgug

SEQ ID NO: 311 - RNA, 19 nt, Artificial Sequence
  Synthesized RNAi sequence
uaacaauuuagcuccuuuc

SEQ ID NO: 312 - RNA, 19 nt, Artificial Sequence
  Synthesized RNAi sequence
uaacacaagcuuucggcag

SEQ ID NO: 313 - RNA, 19 nt, Artificial Sequence
  Synthesized RNAi sequence
uaacacaagcuuucggcag

SEQ ID NO: 314 - RNA, 19 nt, Artificial Sequence
  Synthesized RNAi sequence
uaacacaauuagugauugg

SEQ ID NO: 315 - RNA, 19 nt, Artificial Sequence
  Synthesized RNAi sequence
uaacacacugacuagagac

SEQ ID NO: 316 - RNA, 19 nt, Artificial Sequence
  Synthesized RNAi sequence
uaacacuuugcuucacacu

SEQ ID NO: 317 - RNA, 19 nt, Artificial Sequence
  Synthesized RNAi sequence
uaacagaauaaacaccagg

SEQ ID NO: 318 - RNA, 19 nt, Artificial Sequence
  Synthesized RNAi sequence
uaacagagauuauaagagc

SEQ ID NO: 319 - RNA, 19 nt, Artificial Sequence
  Synthesized RNAi sequence
uaacagcagcuaaaccaug

SEQ ID NO: 320 - RNA, 19 nt, Artificial Sequence
  Synthesized RNAi sequence
uaacaguauagguugacac

SEQ ID NO: 321 - RNA, 19 nt, Artificial Sequence
  Synthesized RNAi sequence
uaacagugcaaguacaaac

SEQ ID NO: 322 - RNA, 19 nt, Artificial Sequence
  Synthesized RNAi sequence
uaacauaauaagaggcugg

SEQ ID NO: 323 - RNA, 19 nt, Artificial Sequence
  Synthesized RNAi sequence
uaacaucaccuaacucacc

SEQ ID NO: 324 - RNA, 19 nt, Artificial Sequence
  Synthesized RNAi sequence
uaacauccugauaaagaac

SEQ ID NO: 325 - RNA, 19 nt, Artificial Sequence
  Synthesized RNAi sequence
uaacauucuucucaacgug

SEQ ID NO: 326 - RNA, 19 nt, Artificial Sequence
  Synthesized RNAi sequence
uaaccaaucuucuucuugc

SEQ ID NO: 327 - RNA, 19 nt, Artificial Sequence
  Synthesized RNAi sequence
uaacguuccauaucaaagc

SEQ ID NO: 328 - RNA, 19 nt, Artificial Sequence
  Synthesized RNAi sequence
uaacuacaaaguaagaauc

SEQ ID NO: 329 - RNA, 19 nt, Artificial Sequence
  Synthesized RNAi sequence
uaacuacaaaguaagaauc

SEQ ID NO: 330 - RNA, 19 nt, Artificial Sequence
  Synthesized RNAi sequence
uaacugcaacuuccgcacu

SEQ ID NO: 331 - RNA, 19 nt, Artificial Sequence
  Synthesized RNAi sequence
uaacuguuauugccugacc

SEQ ID NO: 332 - RNA, 19 nt, Artificial Sequence
  Synthesized RNAi sequence
uaacuucuaugucagauug

SEQ ID NO: 333 - RNA, 19 nt, Artificial Sequence
  Synthesized RNAi sequence
uaacuucuucaacacaagc

SEQ ID NO: 334 - RNA, 19 nt, Artificial Sequence
  Synthesized RNAi sequence
uaacuuuaaucucacauag

SEQ ID NO: 335 - RNA, 19 nt, Artificial Sequence
  Synthesized RNAi sequence
uaacuuuaaucucacauag

SEQ ID NO: 336 - RNA, 19 nt, Artificial Sequence
  Synthesized RNAi sequence
uaagaaacaauaaacuagc

SEQ ID NO: 337 - RNA, 19 nt, Artificial Sequence
  Synthesized RNAi sequence
uaagaaacucuacaccuuc

SEQ ID NO: 338 - RNA, 19 nt, Artificial Sequence
  Synthesized RNAi sequence
uaagaacaacuucagaauc

SEQ ID NO: 339 - RNA, 19 nt, Artificial Sequence
  Synthesized RNAi sequence
uaagaacaacuucagaauc

SEQ ID NO: 340 - RNA, 19 nt, Artificial Sequence
  Synthesized RNAi sequence
uaagacaaacacuacaagg

SEQ ID NO: 341 - RNA, 19 nt, Artificial Sequence
  Synthesized RNAi sequence
uaagaccuucggaaccuuc

SEQ ID NO: 342 - RNA, 19 nt, Artificial Sequence
  Synthesized RNAi sequence
uaagagaacacacagccuc

SEQ ID NO: 343 - RNA, 19 nt, Artificial Sequence
  Synthesized RNAi sequence
uaagaguugugguaaaucg

SEQ ID NO: 344 - RNA, 19 nt, Artificial Sequence
  Synthesized RNAi sequence
uaagauaaccauuauacgc

SEQ ID NO: 345 - RNA, 19 nt, Artificial Sequence
  Synthesized RNAi sequence
uaagauuaacacacugacu

SEQ ID NO: 346 - RNA, 19 nt, Artificial Sequence
  Synthesized RNAi sequence
uaagcaucuauagcuaaag

SEQ ID NO: 347 - RNA, 19 nt, Artificial Sequence
  Synthesized RNAi sequence
uaagcaucuauagcuaaag

SEQ ID NO: 348 - RNA, 19 nt, Artificial Sequence
  Synthesized RNAi sequence
uaagcugacuguaguaaac

SEQ ID NO: 349 - RNA, 19 nt, Artificial Sequence
  Synthesized RNAi sequence
uaagcuuugucacuacaag

SEQ ID NO: 350 - RNA, 19 nt, Artificial Sequence
  Synthesized RNAi sequence
uaaguaaauuuacagcauc

SEQ ID NO: 351 - RNA, 19 nt, Artificial Sequence
  Synthesized RNAi sequence
uaaguauaaugucuccuac

SEQ ID NO: 352 - RNA, 19 nt, Artificial Sequence
  Synthesized RNAi sequence
uaagugguccauuaguagc

SEQ ID NO: 353 - RNA, 19 nt, Artificial Sequence
  Synthesized RNAi sequence
uaagugucugaagcagugg

SEQ ID NO: 354 - RNA, 19 nt, Artificial Sequence
  Synthesized RNAi sequence
uaaguuuaaagucaccaac

SEQ ID NO: 355 - RNA, 19 nt, Artificial Sequence
  Synthesized RNAi sequence
uaauaaagucuagccuuac

SEQ ID NO: 356 - RNA, 19 nt, Artificial Sequence
  Synthesized RNAi sequence
uaauaaagucuagccuuac

SEQ ID NO: 357 - RNA, 19 nt, Artificial Sequence
  Synthesized RNAi sequence
uaauaagaaucuacaacag

SEQ ID NO: 358 - RNA, 19 nt, Artificial Sequence
  Synthesized RNAi sequence
uaauaagaaucuacaacag

SEQ ID NO: 359 - RNA, 19 nt, Artificial Sequence
  Synthesized RNAi sequence
uaauaauuguccaacuuag

SEQ ID NO: 360 - RNA, 19 nt, Artificial Sequence
  Synthesized RNAi sequence
uaauacaaacugguguacc

SEQ ID NO: 361 - RNA, 19 nt, Artificial Sequence
  Synthesized RNAi sequence
uaauacugcgucuugguuc

SEQ ID NO: 362 - RNA, 19 nt, Artificial Sequence
  Synthesized RNAi sequence
uaauacugcgucuugguuc

SEQ ID NO: 363 - RNA, 19 nt, Artificial Sequence
  Synthesized RNAi sequence
uaauaggaccuuuguauuc

SEQ ID NO: 364 - RNA, 19 nt, Artificial Sequence
  Synthesized RNAi sequence
uaauaguccucacuucucu

SEQ ID NO: 365 - RNA, 19 nt, Artificial Sequence
  Synthesized RNAi sequence
uaauaguuaauagcguacu

SEQ ID NO: 366 - RNA, 19 nt, Artificial Sequence
  Synthesized RNAi sequence
uaauauuacaaacuugugc

SEQ ID NO: 367 - RNA, 19 nt, Artificial Sequence
  Synthesized RNAi sequence
uaauauuaggaaaucuaac

SEQ ID NO: 368 - RNA, 19 nt, Artificial Sequence
  Synthesized RNAi sequence
uaaucauaaacaccaagag

SEQ ID NO: 369 - RNA, 19 nt, Artificial Sequence
  Synthesized RNAi sequence
uaaucauuguuaaguaccc

SEQ ID NO: 370 - RNA, 19 nt, Artificial Sequence
  Synthesized RNAi sequence
uaaucuauagaaacggugu

SEQ ID NO: 371 - RNA, 19 nt, Artificial Sequence
  Synthesized RNAi sequence
uaaucuauagaaacggugu

SEQ ID NO: 372 - RNA, 19 nt, Artificial Sequence
  Synthesized RNAi sequence
uaaucucacauagcaaucu

SEQ ID NO: 373 - RNA, 19 nt, Artificial Sequence
  Synthesized RNAi sequence
uaaucucacauagcaaucu

SEQ ID NO: 374 - RNA, 19 nt, Artificial Sequence
  Synthesized RNAi sequence
uaaucuuacaaccagaacu

SEQ ID NO: 375 - RNA, 19 nt, Artificial Sequence
  Synthesized RNAi sequence
uaaucuucaguucaucacc

SEQ ID NO: 376 - RNA, 19 nt, Artificial Sequence
  Synthesized RNAi sequence
uaaucuuuguaagcuuuag

SEQ ID NO: 377 - RNA, 19 nt, Artificial Sequence
  Synthesized RNAi sequence
uaaugaaacuugucacgcc

SEQ ID NO: 378 - RNA, 19 nt, Artificial Sequence
  Synthesized RNAi sequence
uaaugaagcacacauaucu

SEQ ID NO: 379 - RNA, 19 nt, Artificial Sequence
  Synthesized RNAi sequence
uaaugaagucugugaauug

SEQ ID NO: 380 - RNA, 19 nt, Artificial Sequence
  Synthesized RNAi sequence
uaaugcuucaguuguaaac

SEQ ID NO: 381 - RNA, 19 nt, Artificial Sequence
  Synthesized RNAi sequence
uaauggugcaaguagaacu

SEQ ID NO: 382 - RNA, 19 nt, Artificial Sequence
  Synthesized RNAi sequence
uaaugucuccuacaacuuc

SEQ ID NO: 383 - RNA, 19 nt, Artificial Sequence
  Synthesized RNAi sequence
uaauguugaguuugaaggc

SEQ ID NO: 384 - RNA, 19 nt, Artificial Sequence
  Synthesized RNAi sequence
uaauguugucuacuguugu

SEQ ID NO: 385 - RNA, 19 nt, Artificial Sequence
  Synthesized RNAi sequence
uaauguuguuauuaaaguc

SEQ ID NO: 386 - RNA, 19 nt, Artificial Sequence
  Synthesized RNAi sequence
uaauuaauuguugagucac

SEQ ID NO: 387 - RNA, 19 nt, Artificial Sequence
  Synthesized RNAi sequence
uaauuaccuguauagauug

SEQ ID NO: 388 - RNA, 19 nt, Artificial Sequence
  Synthesized RNAi sequence
uaauuauuaaccacauaag

SEQ ID NO: 389 - RNA, 19 nt, Artificial Sequence
  Synthesized RNAi sequence
uaauucaacagaacuuccu

SEQ ID NO: 390 - RNA, 19 nt, Artificial Sequence
  Synthesized RNAi sequence
uaauucaacagaacuuccu

SEQ ID NO: 391 - RNA, 19 nt, Artificial Sequence
  Synthesized RNAi sequence
uaauucuaacauagugcuc

SEQ ID NO: 392 - RNA, 19 nt, Artificial Sequence
  Synthesized RNAi sequence
uaauucuaagcauguuagg

SEQ ID NO: 393 - RNA, 19 nt, Artificial Sequence
  Synthesized RNAi sequence
uaauucuaagcauguuagg

SEQ ID NO: 394 - RNA, 19 nt, Artificial Sequence
  Synthesized RNAi sequence
uaauucuacuacauuuauc

SEQ ID NO: 395 - RNA, 19 nt, Artificial Sequence
  Synthesized RNAi sequence
uaauucuagaauuuguacu

SEQ ID NO: 396 - RNA, 19 nt, Artificial Sequence
  Synthesized RNAi sequence
uaauucucugucagacagc

SEQ ID NO: 397 - RNA, 19 nt, Artificial Sequence
  Synthesized RNAi sequence
uaauugacuucuauuugug

SEQ ID NO: 398 - RNA, 19 nt, Artificial Sequence
  Synthesized RNAi sequence
uaauuguccaacuuagggu

SEQ ID NO: 399 - RNA, 19 nt, Artificial Sequence
  Synthesized RNAi sequence
uaauuuaguaggagacacu

SEQ ID NO: 400 - RNA, 19 nt, Artificial Sequence
  Synthesized RNAi sequence
uaauuuagugcgugaucuc

SEQ ID NO: 401 - RNA, 19 nt, Artificial Sequence
  Synthesized RNAi sequence
uaauuucacuaaguugaac

SEQ ID NO: 402 - RNA, 19 nt, Artificial Sequence
  Synthesized RNAi sequence
uaauuucacuaaguugaac

SEQ ID NO: 403 - RNA, 19 nt, Artificial Sequence
  Synthesized RNAi sequence
uaauuugacagcagaauug

SEQ ID NO: 404 - RNA, 19 nt, Artificial Sequence
  Synthesized RNAi sequence
uaauuugacagcagaauug

SEQ ID NO: 405 - RNA, 19 nt, Artificial Sequence
  Synthesized RNAi sequence
uacaaauugggagcuucgc

SEQ ID NO: 406 - RNA, 19 nt, Artificial Sequence
  Synthesized RNAi sequence
uacaacaccuagcucucug

SEQ ID NO: 407 - RNA, 19 nt, Artificial Sequence
  Synthesized RNAi sequence
uacaacaccuagcucucug

SEQ ID NO: 408 - RNA, 19 nt, Artificial Sequence
  Synthesized RNAi sequence
uacaaccgucuacaacaug

SEQ ID NO: 409 - RNA, 19 nt, Artificial Sequence
  Synthesized RNAi sequence
uacaacugaagcauuaaug

SEQ ID NO: 410 - RNA, 19 nt, Artificial Sequence
  Synthesized RNAi sequence
uacaagagugagcuguuuc

SEQ ID NO: 411 - RNA, 19 nt, Artificial Sequence
  Synthesized RNAi sequence
uacaagaucaauugguugc

SEQ ID NO: 412 - RNA, 19 nt, Artificial Sequence
  Synthesized RNAi sequence
uacaagauuaauuauuaac

SEQ ID NO: 413 - RNA, 19 nt, Artificial Sequence
  Synthesized RNAi sequence
uacaagcuuaaagaauguc

SEQ ID NO: 414 - RNA, 19 nt, Artificial Sequence
  Synthesized RNAi sequence
uacaagguaucugaacacc

SEQ ID NO: 415 - RNA, 19 nt, Artificial Sequence
  Synthesized RNAi sequence
uacaauaauagcucauacc

SEQ ID NO: 416 - RNA, 19 nt, Artificial Sequence
  Synthesized RNAi sequence
uacacaacaucuuaacaca

SEQ ID NO: 417 - RNA, 19 nt, Artificial Sequence
  Synthesized RNAi sequence
uacacuaauucuuucacac

SEQ ID NO: 418 - RNA, 19 nt, Artificial Sequence
  Synthesized RNAi sequence
uacagauagagacaccagc

SEQ ID NO: 419 - RNA, 19 nt, Artificial Sequence
  Synthesized RNAi sequence
uacagauagagacaccagc

SEQ ID NO: 420 - RNA, 19 nt, Artificial Sequence
  Synthesized RNAi sequence
uacagucaauacaagcacc

SEQ ID NO: 421 - RNA, 19 nt, Artificial Sequence
  Synthesized RNAi sequence
uacauaacagcuucuacac

SEQ ID NO: 422 - RNA, 19 nt, Artificial Sequence
  Synthesized RNAi sequence
uacauagcacaaguagaug

SEQ ID NO: 423 - RNA, 19 nt, Artificial Sequence
  Synthesized RNAi sequence
uacauagcacaaguagaug

SEQ ID NO: 424 - RNA, 19 nt, Artificial Sequence
  Synthesized RNAi sequence
uacaucugaaucaacaaac

SEQ ID NO: 425 - RNA, 19 nt, Artificial Sequence
  Synthesized RNAi sequence
uacauuacaagagugagcu

SEQ ID NO: 426 - RNA, 19 nt, Artificial Sequence
  Synthesized RNAi sequence
uacauucuaaccauagcug

SEQ ID NO: 427 - RNA, 19 nt, Artificial Sequence
  Synthesized RNAi sequence
uaccagcacagaauguauc

SEQ ID NO: 428 - RNA, 19 nt, Artificial Sequence
  Synthesized RNAi sequence
uaccauuaaaccuauaagc

SEQ ID NO: 429 - RNA, 19 nt, Artificial Sequence
  Synthesized RNAi sequence
uaccuuacaauaguguaac

SEQ ID NO: 430 - RNA, 19 nt, Artificial Sequence
  Synthesized RNAi sequence
uacgauauauagucuacuc

SEQ ID NO: 431 - RNA, 19 nt, Artificial Sequence
  Synthesized RNAi sequence
uacgauauauagucuacuc

SEQ ID NO: 432 - RNA, 19 nt, Artificial Sequence
  Synthesized RNAi sequence
uacuacagauagagacacc

SEQ ID NO: 433 - RNA, 19 nt, Artificial Sequence
  Synthesized RNAi sequence
uacuacagauagagacacc

SEQ ID NO: 434 - RNA, 19 nt, Artificial Sequence
  Synthesized RNAi sequence
uacuacauuuaucuauagg

SEQ ID NO: 435 - RNA, 19 nt, Artificial Sequence
  Synthesized RNAi sequence
uacuaucugcaucuacaac

SEQ ID NO: 436 - RNA, 19 nt, Artificial Sequence
  Synthesized RNAi sequence
uacuaucugcaucuacaac

SEQ ID NO: 437 - RNA, 19 nt, Artificial Sequence
  Synthesized RNAi sequence
uacuuauuguuaauaacgc

SEQ ID NO: 438 - RNA, 19 nt, Artificial Sequence
  Synthesized RNAi sequence
uacuucauagaugucaacu

SEQ ID NO: 439 - RNA, 19 nt, Artificial Sequence
  Synthesized RNAi sequence
uacuuguaccauacaaccc

SEQ ID NO: 440 - RNA, 19 nt, Artificial Sequence
  Synthesized RNAi sequence
uacuuuagauucgaagacc

SEQ ID NO: 441 - RNA, 19 nt, Artificial Sequence
  Synthesized RNAi sequence
uagaaccuguagaauaaac

SEQ ID NO: 442 - RNA, 19 nt, Artificial Sequence
  Synthesized RNAi sequence
uagaaggucuuuaaugcac

SEQ ID NO: 443 - RNA, 19 nt, Artificial Sequence
  Synthesized RNAi sequence
uagaaguauuuguuccugg

SEQ ID NO: 444 - RNA, 19 nt, Artificial Sequence
  Synthesized RNAi sequence
uagaaguuugauagauucc

SEQ ID NO: 445 - RNA, 19 nt, Artificial Sequence
  Synthesized RNAi sequence
uagaauuccaagcuauaac

SEQ ID NO: 446 - RNA, 19 nt, Artificial Sequence
  Synthesized RNAi sequence
uagacaugacaugaacagg

SEQ ID NO: 447 - RNA, 19 nt, Artificial Sequence
  Synthesized RNAi sequence
uagacucaguaagaacacc

SEQ ID NO: 448 - RNA, 19 nt, Artificial Sequence
  Synthesized RNAi sequence
uagagucagcacacaaagc

SEQ ID NO: 449 - RNA, 19 nt, Artificial Sequence
  Synthesized RNAi sequence
uagaguuauuagaguaagc

SEQ ID NO: 450 - RNA, 19 nt, Artificial Sequence
  Synthesized RNAi sequence
uagauaaucuuuguaagcu

SEQ ID NO: 451 - RNA, 19 nt, Artificial Sequence
  Synthesized RNAi sequence
uagaugucaacucaaagcc

SEQ ID NO: 452 - RNA, 19 nt, Artificial Sequence
  Synthesized RNAi sequence
uagauuaaagaaccuaggc

SEQ ID NO: 453 - RNA, 19 nt, Artificial Sequence
  Synthesized RNAi sequence
uagauuaccagaagcagcg

SEQ ID NO: 454 - RNA, 19 nt, Artificial Sequence
  Synthesized RNAi sequence
uagauuaccagaagcagcg

SEQ ID NO: 455 - RNA, 19 nt, Artificial Sequence
  Synthesized RNAi sequence
uagauucgaagacccaguc

SEQ ID NO: 456 - RNA, 19 nt, Artificial Sequence
  Synthesized RNAi sequence
uagcaaucuuuaaucagug

SEQ ID NO: 457 - RNA, 19 nt, Artificial Sequence
  Synthesized RNAi sequence
uagcaaucuuuaaucagug

SEQ ID NO: 458 - RNA, 19 nt, Artificial Sequence
  Synthesized RNAi sequence
uagcacaaguagauguagu

SEQ ID NO: 459 - RNA, 19 nt, Artificial Sequence
  Synthesized RNAi sequence
uagcacaaguagauguagu

SEQ ID NO: 460 - RNA, 19 nt, Artificial Sequence
  Synthesized RNAi sequence
uagcacauugguaaacacc

SEQ ID NO: 461 - RNA, 19 nt, Artificial Sequence
  Synthesized RNAi sequence
uagcuaaucuauagaaacg

SEQ ID NO: 462 - RNA, 19 nt, Artificial Sequence
  Synthesized RNAi sequence
uagcuaaucuauagaaacg

SEQ ID NO: 463 - RNA, 19 nt, Artificial Sequence
  Synthesized RNAi sequence
uagcuacaugugcauuacc

SEQ ID NO: 464 - RNA, 19 nt, Artificial Sequence
  Synthesized RNAi sequence
uagguguaucaacauaacc

SEQ ID NO: 465 - RNA, 19 nt, Artificial Sequence
  Synthesized RNAi sequence
uaguaacaucagcuccauc

SEQ ID NO: 466 - RNA, 19 nt, Artificial Sequence
  Synthesized RNAi sequence
uaguaagacuagaauuguc

SEQ ID NO: 467 - RNA, 19 nt, Artificial Sequence
  Synthesized RNAi sequence
uaguaaguggguaagcauc

SEQ ID NO: 468 - RNA, 19 nt, Artificial Sequence
  Synthesized RNAi sequence
uaguaaguggguaagcauc

SEQ ID NO: 469 - RNA, 19 nt, Artificial Sequence
  Synthesized RNAi sequence
uaguacuacagauagagac

SEQ ID NO: 470 - RNA, 19 nt, Artificial Sequence
  Synthesized RNAi sequence
uaguacuacagauagagac

SEQ ID NO: 471 - RNA, 19 nt, Artificial Sequence
  Synthesized RNAi sequence
uaguagaguucaaauagcc

SEQ ID NO: 472 - RNA, 19 nt, Artificial Sequence
  Synthesized RNAi sequence
uaguagcagcaagauuagc

SEQ ID NO: 473 - RNA, 19 nt, Artificial Sequence
  Synthesized RNAi sequence
uaguagucggcauagaugc

SEQ ID NO: 474 - RNA, 19 nt, Artificial Sequence
  Synthesized RNAi sequence
uaguaguugucugauuguc

SEQ ID NO: 475 - RNA, 19 nt, Artificial Sequence
  Synthesized RNAi sequence
uaguauuguuauagcggcc

SEQ ID NO: 476 - RNA, 19 nt, Artificial Sequence
  Synthesized RNAi sequence
uagucuacuucuugcagag

SEQ ID NO: 477 - RNA, 19 nt, Artificial Sequence
  Synthesized RNAi sequence
uagucugagucugauaacu

SEQ ID NO: 478 - RNA, 19 nt, Artificial Sequence
  Synthesized RNAi sequence
uagugucaaaucuacaaac

SEQ ID NO: 479 - RNA, 19 nt, Artificial Sequence
  Synthesized RNAi sequence
uaguuaacuuuaaucucac

SEQ ID NO: 480 - RNA, 19 nt, Artificial Sequence
  Synthesized RNAi sequence
uaguuaacuuuaaucucac

SEQ ID NO: 481 - RNA, 19 nt, Artificial Sequence
  Synthesized RNAi sequence
uaguuaauagcguacuucu

SEQ ID NO: 482 - RNA, 19 nt, Artificial Sequence
  Synthesized RNAi sequence
uaguuguauccauugcucc

SEQ ID NO: 483 - RNA, 19 nt, Artificial Sequence
  Synthesized RNAi sequence
uaguugucugauuguccuc

SEQ ID NO: 484 - RNA, 19 nt, Artificial Sequence
  Synthesized RNAi sequence
uaguugugcguaauaucgu

SEQ ID NO: 485 - RNA, 19 nt, Artificial Sequence
  Synthesized RNAi sequence
uaguuguucagacaaugac

SEQ ID NO: 486 - RNA, 19 nt, Artificial Sequence
  Synthesized RNAi sequence
uaguuuacagucauguacu

SEQ ID NO: 487 - RNA, 19 nt, Artificial Sequence
  Synthesized RNAi sequence
uaguuuacagucauguacu

SEQ ID NO: 488 - RNA, 19 nt, Artificial Sequence
  Synthesized RNAi sequence
uaguuucuacaucugaauc

SEQ ID NO: 489 - RNA, 19 nt, Artificial Sequence
  Synthesized RNAi sequence
uauaaauuaaacacagacc

SEQ ID NO: 490 - RNA, 19 nt, Artificial Sequence
  Synthesized RNAi sequence
uauaacacuuugcuucaca

SEQ ID NO: 491 - RNA, 19 nt, Artificial Sequence
  Synthesized RNAi sequence
uauaacagcagcguacaac

SEQ ID NO: 492 - RNA, 19 nt, Artificial Sequence
  Synthesized RNAi sequence
uauaaucagcaaucuuucc

SEQ ID NO: 493 - RNA, 19 nt, Artificial Sequence
  Synthesized RNAi sequence
uauaaugucuccuacaacu

SEQ ID NO: 494 - RNA, 19 nt, Artificial Sequence
  Synthesized RNAi sequence
uauaauuaguacaaacacg

SEQ ID NO: 495 - RNA, 19 nt, Artificial Sequence
  Synthesized RNAi sequence
uauacaugucucugggacc

SEQ ID NO: 496 - RNA, 19 nt, Artificial Sequence
  Synthesized RNAi sequence
uauacauuugggucauagc

SEQ ID NO: 497 - RNA, 19 nt, Artificial Sequence
  Synthesized RNAi sequence
uauacauuugggucauagc

SEQ ID NO: 498 - RNA, 19 nt, Artificial Sequence
  Synthesized RNAi sequence
uauagacguaaucaaaucc

SEQ ID NO: 499 - RNA, 19 nt, Artificial Sequence
  Synthesized RNAi sequence
uauagcuuggaauucuaac

SEQ ID NO: 500 - RNA, 19 nt, Artificial Sequence
  Synthesized RNAi sequence
uauaggauauucaauaguc

SEQ ID NO: 501 - RNA, 19 nt, Artificial Sequence
  Synthesized RNAi sequence
uauaggucauguccuuagg

SEQ ID NO: 502 - RNA, 19 nt, Artificial Sequence
  Synthesized RNAi sequence
uauagguugacacauaagc

SEQ ID NO: 503 - RNA, 19 nt, Artificial Sequence
  Synthesized RNAi sequence
uauauaggacagaauaauc

SEQ ID NO: 504 - RNA, 19 nt, Artificial Sequence
  Synthesized RNAi sequence
uauauagucuacucuugug

SEQ ID NO: 505 - RNA, 19 nt, Artificial Sequence
  Synthesized RNAi sequence
uauauagucuacucuugug

SEQ ID NO: 506 - RNA, 19 nt, Artificial Sequence
  Synthesized RNAi sequence
uauauauggagcaucuuuc

SEQ ID NO: 507 - RNA, 19 nt, Artificial Sequence
  Synthesized RNAi sequence
uauauucuaagcacacgcc

SEQ ID NO: 508 - RNA, 19 nt, Artificial Sequence
  Synthesized RNAi sequence
uaucaaaccucuuaguacc

SEQ ID NO: 509 - RNA, 19 nt, Artificial Sequence
  Synthesized RNAi sequence
uaucaauuugcacuucagc

SEQ ID NO: 510 - RNA, 19 nt, Artificial Sequence
  Synthesized RNAi sequence
uaucauaaaccaaagcacu

SEQ ID NO: 511 - RNA, 19 nt, Artificial Sequence
  Synthesized RNAi sequence
uaucaucaucuaaccaauc

SEQ ID NO: 512 - RNA, 19 nt, Artificial Sequence
  Synthesized RNAi sequence
uaucaucuuauguccuucc

SEQ ID NO: 513 - RNA, 19 nt, Artificial Sequence
  Synthesized RNAi sequence
uaucauuaguaagcauaac

SEQ ID NO: 514 - RNA, 19 nt, Artificial Sequence
  Synthesized RNAi sequence
uaucauuaguaagcauaac

SEQ ID NO: 515 - RNA, 19 nt, Artificial Sequence
  Synthesized RNAi sequence
uaucuaaugucaguacacc

SEQ ID NO: 516 - RNA, 19 nt, Artificial Sequence
  Synthesized RNAi sequence
uaucuaaugucaguacacc

SEQ ID NO: 517 - RNA, 19 nt, Artificial Sequence
  Synthesized RNAi sequence
uaucugcaucuacaaccug

SEQ ID NO: 518 - RNA, 19 nt, Artificial Sequence
  Synthesized RNAi sequence
uaucugcaucuacaaccug

SEQ ID NO: 519 - RNA, 19 nt, Artificial Sequence
  Synthesized RNAi sequence
uaucuuuguuguuacaaca

SEQ ID NO: 520 - RNA, 19 nt, Artificial Sequence
  Synthesized RNAi sequence
uauguaacaauuuagcucc

SEQ ID NO: 521 - RNA, 19 nt, Artificial Sequence
  Synthesized RNAi sequence
uauguacaacaccuagcuc

SEQ ID NO: 522 - RNA, 19 nt, Artificial Sequence
  Synthesized RNAi sequence
uauguacaacaccuagcuc

SEQ ID NO: 523 - RNA, 19 nt, Artificial Sequence
  Synthesized RNAi sequence
uaugucaacauggucuugu

SEQ ID NO: 524 - RNA, 19 nt, Artificial Sequence
  Synthesized RNAi sequence
uauguuagacuucucagug

SEQ ID NO: 525 - RNA, 19 nt, Artificial Sequence
  Synthesized RNAi sequence
uauguuugcgagcaagaac

SEQ ID NO: 526 - RNA, 19 nt, Artificial Sequence
  Synthesized RNAi sequence
uauguuugcgagcaagaac

SEQ ID NO: 527 - RNA, 19 nt, Artificial Sequence
  Synthesized RNAi sequence
uauuaacagcagcuaaacc

SEQ ID NO: 528 - RNA, 19 nt, Artificial Sequence
  Synthesized RNAi sequence
uauuacacaguuacuucac

SEQ ID NO: 529 - RNA, 19 nt, Artificial Sequence
  Synthesized RNAi sequence
uauuaguaaguaaauuuac

SEQ ID NO: 530 - RNA, 19 nt, Artificial Sequence
  Synthesized RNAi sequence
uauuaguugcauuguuaac

SEQ ID NO: 531 - RNA, 19 nt, Artificial Sequence
  Synthesized RNAi sequence
uauuauauugcguaagagg

SEQ ID NO: 532 - RNA, 19 nt, Artificial Sequence
  Synthesized RNAi sequence
uauuaucauaaaccaaagc

SEQ ID NO: 533 - RNA, 19 nt, Artificial Sequence
  Synthesized RNAi sequence
uauuauguggguuaucuuc

SEQ ID NO: 534 - RNA, 19 nt, Artificial Sequence
  Synthesized RNAi sequence
uauuauuagguguaucaac

SEQ ID NO: 535 - RNA, 19 nt, Artificial Sequence
  Synthesized RNAi sequence
uauucuacagguucuaaug

SEQ ID NO: 536 - RNA, 19 nt, Artificial Sequence
  Synthesized RNAi sequence
uauucugguucuagugugc

SEQ ID NO: 537 - RNA, 19 nt, Artificial Sequence
  Synthesized RNAi sequence
uauucuugcuaguuacacu

SEQ ID NO: 538 - RNA, 19 nt, Artificial Sequence
  Synthesized RNAi sequence
uauucuuugcuauaguagu

SEQ ID NO: 539 - RNA, 19 nt, Artificial Sequence
  Synthesized RNAi sequence
uauugaaauaaucaucauc

SEQ ID NO: 540 - RNA, 19 nt, Artificial Sequence
  Synthesized RNAi sequence
uauugaaauaaucaucauc

SEQ ID NO: 541 - RNA, 19 nt, Artificial Sequence
  Synthesized RNAi sequence
uauugauguugacuuucuc

SEQ ID NO: 542 - RNA, 19 nt, Artificial Sequence
  Synthesized RNAi sequence
uauugcugcuagagaccuc

SEQ ID NO: 543 - RNA, 19 nt, Artificial Sequence
  Synthesized RNAi sequence
uauugcuuugcuuguacag

SEQ ID NO: 544 - RNA, 19 nt, Artificial Sequence
  Synthesized RNAi sequence
uauuuacauacaaacugcc

SEQ ID NO: 545 - RNA, 19 nt, Artificial Sequence
  Synthesized RNAi sequence
uauuuagguuguuuaaucc

SEQ ID NO: 546 - RNA, 19 nt, Artificial Sequence
  Synthesized RNAi sequence
uauuuaucuaacuccuccu

SEQ ID NO: 547 - RNA, 19 nt, Artificial Sequence
  Synthesized RNAi sequence
uauuucugaacaugacuac

SEQ ID NO: 548 - RNA, 19 nt, Artificial Sequence
  Synthesized RNAi sequence
uauuuguacauacuuaccu

SEQ ID NO: 549 - RNA, 19 nt, Artificial Sequence
  Synthesized RNAi sequence
ucaacuuacuccuacuugg

SEQ ID NO: 550 - RNA, 19 nt, Artificial Sequence
  Synthesized RNAi sequence
ucaagauuguuagaauucc

SEQ ID NO: 551 - RNA, 19 nt, Artificial Sequence
  Synthesized RNAi sequence
ucaauagucugaacaacug

SEQ ID NO: 552 - RNA, 19 nt, Artificial Sequence
  Synthesized RNAi sequence
ucaauuucaacuucaaugg

SEQ ID NO: 553 - RNA, 19 nt, Artificial Sequence
  Synthesized RNAi sequence
ucacuguugcuacaucacg

SEQ ID NO: 554 - RNA, 19 nt, Artificial Sequence
  Synthesized RNAi sequence
ucgaaucuaaaguaguacc

SEQ ID NO: 555 - RNA, 19 nt, Artificial Sequence
  Synthesized RNAi sequence
ucuaauuaauuguugaguc

SEQ ID NO: 556 - RNA, 19 nt, Artificial Sequence
  Synthesized RNAi sequence
ucuaccagugucuaugacc

SEQ ID NO: 557 - RNA, 19 nt, Artificial Sequence
  Synthesized RNAi sequence
ucuaguaguugcacauguc

SEQ ID NO: 558 - RNA, 19 nt, Artificial Sequence
  Synthesized RNAi sequence
ucugagucugauaacuagc

SEQ ID NO: 559 - RNA, 19 nt, Artificial Sequence
  Synthesized RNAi sequence
ucuuagugucaauaaaguc

SEQ ID NO: 560 - RNA, 19 nt, Artificial Sequence
  Synthesized RNAi sequence
ucuucaucaaauuugcagc

SEQ ID NO: 561 - RNA, 19 nt, Artificial Sequence
  Synthesized RNAi sequence
ucuuguccucagaucuagc

SEQ ID NO: 562 - RNA, 19 nt, Artificial Sequence
  Synthesized RNAi sequence
ucuuguccucagaucuagc

SEQ ID NO: 563 - RNA, 19 nt, Artificial Sequence
  Synthesized RNAi sequence
ugaaacucaagccuuaccg

SEQ ID NO: 564 - RNA, 19 nt, Artificial Sequence
  Synthesized RNAi sequence
ugaaacucaagccuuaccg

SEQ ID NO: 565 - RNA, 19 nt, Artificial Sequence
  Synthesized RNAi sequence
ugaacaucaaucauaaacg

SEQ ID NO: 566 - RNA, 19 nt, Artificial Sequence
  Synthesized RNAi sequence
ugacuaucaucaucuaacc

SEQ ID NO: 567 - RNA, 19 nt, Artificial Sequence
  Synthesized RNAi sequence
ugagucugauaacuagcgc

SEQ ID NO: 568 - RNA, 19 nt, Artificial Sequence
  Synthesized RNAi sequence
ugauaauuugcaacauugc

SEQ ID NO: 569 - RNA, 19 nt, Artificial Sequence
  Synthesized RNAi sequence
ugauaucacacauuguugg

SEQ ID NO: 570 - RNA, 19 nt, Artificial Sequence
  Synthesized RNAi sequence
ugauaucacacauuguugg

SEQ ID NO: 571 - RNA, 19 nt, Artificial Sequence
  Synthesized RNAi sequence
uguaacacaagcuuucggc

SEQ ID NO: 572 - RNA, 19 nt, Artificial Sequence
  Synthesized RNAi sequence
uguaacacaagcuuucggc

SEQ ID NO: 573 - RNA, 19 nt, Artificial Sequence
  Synthesized RNAi sequence
uguaacuucuucaauuguc

SEQ ID NO: 574 - RNA, 19 nt, Artificial Sequence
  Synthesized RNAi sequence
uguaaguuguuguaccucg

SEQ ID NO: 575 - RNA, 19 nt, Artificial Sequence
  Synthesized RNAi sequence
uguaauaagcaucuuguag

SEQ ID NO: 576 - RNA, 19 nt, Artificial Sequence
  Synthesized RNAi sequence
uguacauucuaaccauagc

SEQ ID NO: 577 - RNA, 19 nt, Artificial Sequence
  Synthesized RNAi sequence
uguacuuauuauaaagagc

SEQ ID NO: 578 - RNA, 19 nt, Artificial Sequence
  Synthesized RNAi sequence
uguagcuagucaauccauc

SEQ ID NO: 579 - RNA, 19 nt, Artificial Sequence
  Synthesized RNAi sequence
uguagcuuguuuaccacac

SEQ ID NO: 580 - RNA, 19 nt, Artificial Sequence
  Synthesized RNAi sequence
uguauuacacaguuacuuc

SEQ ID NO: 581 - RNA, 19 nt, Artificial Sequence
  Synthesized RNAi sequence
ugucauaaaggucucuauc

SEQ ID NO: 582 - RNA, 19 nt, Artificial Sequence
  Synthesized RNAi sequence
ugucauaauacgcaucacc

SEQ ID NO: 583 - RNA, 19 nt, Artificial Sequence
  Synthesized RNAi sequence
ugucauuaguauaacuacc

SEQ ID NO: 584 - RNA, 19 nt, Artificial Sequence
  Synthesized RNAi sequence
uguuaacucaucauguagc

SEQ ID NO: 585 - RNA, 19 nt, Artificial Sequence
  Synthesized RNAi sequence
uguuaacucaucauguagc

SEQ ID NO: 586 - RNA, 19 nt, Artificial Sequence
  Synthesized RNAi sequence
uguugcuacaucacgaacg

SEQ ID NO: 587 - RNA, 19 nt, Artificial Sequence
  Synthesized RNAi sequence
uguuuaugucuacagcacc

SEQ ID NO: 588 - RNA, 19 nt, Artificial Sequence
  Synthesized RNAi sequence
uguuugaauaguaguuguc

SEQ ID NO: 589 - RNA, 19 nt, Artificial Sequence
  Synthesized RNAi sequence
uguuuguaacaguuuacuc

SEQ ID NO: 590 - RNA, 19 nt, Artificial Sequence
  Synthesized RNAi sequence
uuaaacaccguguaacuau

SEQ ID NO: 591 - RNA, 19 nt, Artificial Sequence
  Synthesized RNAi sequence
uuaaacacgcuuguuaaac

SEQ ID NO: 592 - RNA, 19 nt, Artificial Sequence
  Synthesized RNAi sequence
uuaaaccgugcuuuaacug

SEQ ID NO: 593 - RNA, 19 nt, Artificial Sequence
  Synthesized RNAi sequence
uuaaacuauuauuugcugg

SEQ ID NO: 594 - RNA, 19 nt, Artificial Sequence
  Synthesized RNAi sequence
uuaaacuguagugacaagu

SEQ ID NO: 595 - RNA, 19 nt, Artificial Sequence
  Synthesized RNAi sequence
uuaaagaauguauaggguc

SEQ ID NO: 596 - RNA, 19 nt, Artificial Sequence
  Synthesized RNAi sequence
uuaaaggcaacuacaugac

SEQ ID NO: 597 - RNA, 19 nt, Artificial Sequence
  Synthesized RNAi sequence
uuaaaguucuuuaugcuag

SEQ ID NO: 598 - RNA, 19 nt, Artificial Sequence
  Synthesized RNAi sequence
uuaaaguucuuuaugcuag

SEQ ID NO: 599 - RNA, 19 nt, Artificial Sequence
  Synthesized RNAi sequence
uuaaaugaagccucuagac

SEQ ID NO: 600 - RNA, 19 nt, Artificial Sequence
  Synthesized RNAi sequence
uuaaaugaaucucucaucg

SEQ ID NO: 601 - RNA, 19 nt, Artificial Sequence
  Synthesized RNAi sequence
uuaaauugucaucuucguc

SEQ ID NO: 602 - RNA, 19 nt, Artificial Sequence
  Synthesized RNAi sequence
uuaaauugucaucuucguc

SEQ ID NO: 603 - RNA, 19 nt, Artificial Sequence
  Synthesized RNAi sequence
uuaacaagcguguuuaaag

SEQ ID NO: 604 - RNA, 19 nt, Artificial Sequence
  Synthesized RNAi sequence
uuaacaauaaguagggacu

SEQ ID NO: 605 - RNA, 19 nt, Artificial Sequence
  Synthesized RNAi sequence
uuaacacaauuagugauug

SEQ ID NO: 606 - RNA, 19 nt, Artificial Sequence
  Synthesized RNAi sequence
uuaacaccaauagcagucc

SEQ ID NO: 607 - RNA, 19 nt, Artificial Sequence
  Synthesized RNAi sequence
uuaacaccaauagcagucc

SEQ ID NO: 608 - RNA, 19 nt, Artificial Sequence
  Synthesized RNAi sequence
uuaacauauagugaaccgc

SEQ ID NO: 609 - RNA, 19 nt, Artificial Sequence
  Synthesized RNAi sequence
uuaacauauagugaaccgc

SEQ ID NO: 610 - RNA, 19 nt, Artificial Sequence
  Synthesized RNAi sequence
uuaaccaaauuaguagacu

SEQ ID NO: 611 - RNA, 19 nt, Artificial Sequence
  Synthesized RNAi sequence
uuaacguuccauaucaaag

SEQ ID NO: 612 - RNA, 19 nt, Artificial Sequence
  Synthesized RNAi sequence
uuaacugguuuaaaucauc

SEQ ID NO: 613 - RNA, 19 nt, Artificial Sequence
  Synthesized RNAi sequence
uuaacuuuaaucucacaua

SEQ ID NO: 614 - RNA, 19 nt, Artificial Sequence
  Synthesized RNAi sequence
uuaacuuuaaucucacaua

SEQ ID NO: 615 - RNA, 19 nt, Artificial Sequence
  Synthesized RNAi sequence
uuaagaaucauacaucacc

SEQ ID NO: 616 - RNA, 19 nt, Artificial Sequence
  Synthesized RNAi sequence
uuaagaguugugguaaauc

SEQ ID NO: 617 - RNA, 19 nt, Artificial Sequence
  Synthesized RNAi sequence
uuaagcacugucuuugccu

SEQ ID NO: 618 - RNA, 19 nt, Artificial Sequence
  Synthesized RNAi sequence
uuaagcaugucuucagagg

SEQ ID NO: 619 - RNA, 19 nt, Artificial Sequence
  Synthesized RNAi sequence
uuaagcuuaaguacacaau

SEQ ID NO: 620 - RNA, 19 nt, Artificial Sequence
  Synthesized RNAi sequence
uuaagguuagauagcacuc

SEQ ID NO: 621 - RNA, 19 nt, Artificial Sequence
  Synthesized RNAi sequence
uuaaguaaauuauaaauug

SEQ ID NO: 622 - RNA, 19 nt, Artificial Sequence
  Synthesized RNAi sequence
uuaaguaaauuauaaauug

SEQ ID NO: 623 - RNA, 19 nt, Artificial Sequence
  Synthesized RNAi sequence
uuaaguacccaucuaccac

SEQ ID NO: 624 - RNA, 19 nt, Artificial Sequence
  Synthesized RNAi sequence
uuaaguacuuuaucaaucc

SEQ ID NO: 625 - RNA, 19 nt, Artificial Sequence
  Synthesized RNAi sequence
uuaauaacgcuacuaaugu

SEQ ID NO: 626 - RNA, 19 nt, Artificial Sequence
  Synthesized RNAi sequence
uuaauaguccucacuucuc

SEQ ID NO: 627 - RNA, 19 nt, Artificial Sequence
  Synthesized RNAi sequence
uuaauagugaaauugggcc

SEQ ID NO: 628 - RNA, 19 nt, Artificial Sequence
  Synthesized RNAi sequence
uuaaucucacauagcaauc

SEQ ID NO: 629 - RNA, 19 nt, Artificial Sequence
  Synthesized RNAi sequence
uuaaucucacauagcaauc

SEQ ID NO: 630 - RNA, 19 nt, Artificial Sequence
  Synthesized RNAi sequence
uuaaucuuacaaccagaac

SEQ ID NO: 631 - RNA, 19 nt, Artificial Sequence
  Synthesized RNAi sequence
uuaaucuucaguucaucac

SEQ ID NO: 632 - RNA, 19 nt, Artificial Sequence
  Synthesized RNAi sequence
uuaaugaagcacacauauc

SEQ ID NO: 633 - RNA, 19 nt, Artificial Sequence
  Synthesized RNAi sequence
uuaauguauacauugucag

SEQ ID NO: 634 - RNA, 19 nt, Artificial Sequence
  Synthesized RNAi sequence
uuaauguugaguuugaagg

SEQ ID NO: 635 - RNA, 19 nt, Artificial Sequence
  Synthesized RNAi sequence
uuaauguugucuacuguug

SEQ ID NO: 636 - RNA, 19 nt, Artificial Sequence
  Synthesized RNAi sequence
uuaauuaugcuuauuaucu

SEQ ID NO: 637 - RNA, 19 nt, Artificial Sequence
  Synthesized RNAi sequence
uuaauucaacagaacuucc

SEQ ID NO: 638 - RNA, 19 nt, Artificial Sequence
  Synthesized RNAi sequence
uuaauucaacagaacuucc

SEQ ID NO: 639 - RNA, 19 nt, Artificial Sequence
  Synthesized RNAi sequence
uuaauucuagaauuuguac

SEQ ID NO: 640 - RNA, 19 nt, Artificial Sequence
  Synthesized RNAi sequence
uuaauugacuucuauuugu

SEQ ID NO: 641 - RNA, 19 nt, Artificial Sequence
  Synthesized RNAi sequence
uuaauuuaguaggagacac

SEQ ID NO: 642 - RNA, 19 nt, Artificial Sequence
  Synthesized RNAi sequence
uuaauuuagugcgugaucu

SEQ ID NO: 643 - RNA, 19 nt, Artificial Sequence
  Synthesized RNAi sequence
uuaauuuccuuugcacagg

SEQ ID NO: 644 - RNA, 19 nt, Artificial Sequence
  Synthesized RNAi sequence
uuaauuugcguguuucuuc

SEQ ID NO: 645 - RNA, 19 nt, Artificial Sequence
  Synthesized RNAi sequence
uuaauuuguaaguuguugu

SEQ ID NO: 646 - RNA, 19 nt, Artificial Sequence
  Synthesized RNAi sequence
uuacaaauugggagcuucg

SEQ ID NO: 647 - RNA, 19 nt, Artificial Sequence
  Synthesized RNAi sequence
uuacaauaauagcucauac

SEQ ID NO: 648 - RNA, 19 nt, Artificial Sequence
  Synthesized RNAi sequence
uuacacauuagggcucuuc

SEQ ID NO: 649 - RNA, 19 nt, Artificial Sequence
  Synthesized RNAi sequence
uuacagaauaaauuggauc

SEQ ID NO: 650 - RNA, 19 nt, Artificial Sequence
  Synthesized RNAi sequence
uuacagucauguacucaac

SEQ ID NO: 651 - RNA, 19 nt, Artificial Sequence
  Synthesized RNAi sequence
uuacagucauguacucaac

SEQ ID NO: 652 - RNA, 19 nt, Artificial Sequence
  Synthesized RNAi sequence
uuacauggauuugucuucu

SEQ ID NO: 653 - RNA, 19 nt, Artificial Sequence
  Synthesized RNAi sequence
uuacauuacaagagugagc

SEQ ID NO: 654 - RNA, 19 nt, Artificial Sequence
  Synthesized RNAi sequence
uuacauucaacucaggacu

SEQ ID NO: 655 - RNA, 19 nt, Artificial Sequence
  Synthesized RNAi sequence
uuaccacagaaauucuacc

SEQ ID NO: 656 - RNA, 19 nt, Artificial Sequence
  Synthesized RNAi sequence
uuacuauuaguguuaccac

SEQ ID NO: 657 - RNA, 19 nt, Artificial Sequence
  Synthesized RNAi sequence
uuacucguguccugucaac

SEQ ID NO: 658 - RNA, 19 nt, Artificial Sequence
  Synthesized RNAi sequence
uuacugaagucauugagag

SEQ ID NO: 659 - RNA, 19 nt, Artificial Sequence
  Synthesized RNAi sequence
uuacuuguaccauacaacc

SEQ ID NO: 660 - RNA, 19 nt, Artificial Sequence
  Synthesized RNAi sequence
uuacuuucaguuauaaaug

SEQ ID NO: 661 - RNA, 19 nt, Artificial Sequence
  Synthesized RNAi sequence
uuagaaguauuuguuccug

SEQ ID NO: 662 - RNA, 19 nt, Artificial Sequence
  Synthesized RNAi sequence
uuagacaugacaugaacag

SEQ ID NO: 663 - RNA, 19 nt, Artificial Sequence
  Synthesized RNAi sequence
uuagacucaguaagaacac

SEQ ID NO: 664 - RNA, 19 nt, Artificial Sequence
  Synthesized RNAi sequence
uuagacucauucaaggagg

SEQ ID NO: 665 - RNA, 19 nt, Artificial Sequence
  Synthesized RNAi sequence
uuagaguaucaugacguuc

SEQ ID NO: 666 - RNA, 19 nt, Artificial Sequence
  Synthesized RNAi sequence
uuagaguaucaugacguuc

SEQ ID NO: 667 - RNA, 19 nt, Artificial Sequence
  Synthesized RNAi sequence
uuagauucgaagacccagu

SEQ ID NO: 668 - RNA, 19 nt, Artificial Sequence
  Synthesized RNAi sequence
uuagcuucuuccacaaugu

SEQ ID NO: 669 - RNA, 19 nt, Artificial Sequence
  Synthesized RNAi sequence
uuaggauguuuaguaagug

SEQ ID NO: 670 - RNA, 19 nt, Artificial Sequence
  Synthesized RNAi sequence
uuaggauguuuaguaagug

SEQ ID NO: 671 - RNA, 19 nt, Artificial Sequence
  Synthesized RNAi sequence
uuagguguaucaacauaac

SEQ ID NO: 672 - RNA, 19 nt, Artificial Sequence
  Synthesized RNAi sequence
uuaguaagcauaacagaau

SEQ ID NO: 673 - RNA, 19 nt, Artificial Sequence
  Synthesized RNAi sequence
uuaguaagcauaacagaau

SEQ ID NO: 674 - RNA, 19 nt, Artificial Sequence
  Synthesized RNAi sequence
uuaguagaguucaaauagc

SEQ ID NO: 675 - RNA, 19 nt, Artificial Sequence
  Synthesized RNAi sequence
uuaguauaacuaccaccac

SEQ ID NO: 676 - RNA, 19 nt, Artificial Sequence
  Synthesized RNAi sequence
uuagucaaauucucagugc

SEQ ID NO: 677 - RNA, 19 nt, Artificial Sequence
  Synthesized RNAi sequence
uuagucuacuucuugcaga

SEQ ID NO: 678 - RNA, 19 nt, Artificial Sequence
  Synthesized RNAi sequence
uuagucugagucugauaac

SEQ ID NO: 679 - RNA, 19 nt, Artificial Sequence
  Synthesized RNAi sequence
uuagugucaauaaagucca

SEQ ID NO: 680 - RNA, 19 nt, Artificial Sequence
  Synthesized RNAi sequence
uuaguuagcaaugugcgug

SEQ ID NO: 681 - RNA, 19 nt, Artificial Sequence
  Synthesized RNAi sequence
uuaguuucuacaucugaau

SEQ ID NO: 682 - RNA, 19 nt, Artificial Sequence
  Synthesized RNAi sequence
uuauaaagagcuaaguauc

SEQ ID NO: 683 - RNA, 19 nt, Artificial Sequence
  Synthesized RNAi sequence
uuauaagcuuugucacuac

SEQ ID NO: 684 - RNA, 19 nt, Artificial Sequence
  Synthesized RNAi sequence
uuauaauaauuguccaacu

SEQ ID NO: 685 - RNA, 19 nt, Artificial Sequence
  Synthesized RNAi sequence
uuauaaucagcaaucuuuc

SEQ ID NO: 686 - RNA, 19 nt, Artificial Sequence
  Synthesized RNAi sequence
uuauacuuaggugucuuag

SEQ ID NO: 687 - RNA, 19 nt, Artificial Sequence
  Synthesized RNAi sequence
uuauagacguaaucaaauc

SEQ ID NO: 688 - RNA, 19 nt, Artificial Sequence
  Synthesized RNAi sequence
uuauaggaaccagcaagug

SEQ ID NO: 689 - RNA, 19 nt, Artificial Sequence
  Synthesized RNAi sequence
uuauaggauauucaauagu

SEQ ID NO: 690 - RNA, 19 nt, Artificial Sequence
  Synthesized RNAi sequence
uuauauaauugucuguugg

SEQ ID NO: 691 - RNA, 19 nt, Artificial Sequence
  Synthesized RNAi sequence
uuauauguuuauagugacc

SEQ ID NO: 692 - RNA, 19 nt, Artificial Sequence
  Synthesized RNAi sequence
uuaucaaaccucuuaguac

SEQ ID NO: 693 - RNA, 19 nt, Artificial Sequence
  Synthesized RNAi sequence
uuaucaaagacagcuaagu

SEQ ID NO: 694 - RNA, 19 nt, Artificial Sequence
  Synthesized RNAi sequence
uuaucaggauguuaacugc

SEQ ID NO: 695 - RNA, 19 nt, Artificial Sequence
  Synthesized RNAi sequence
uuaucauaaaccaaagcac

SEQ ID NO: 696 - RNA, 19 nt, Artificial Sequence
  Synthesized RNAi sequence
uuauccaacuuucuaagca

SEQ ID NO: 697 - RNA, 19 nt, Artificial Sequence
  Synthesized RNAi sequence
uuauccaacuuucuaagca

SEQ ID NO: 698 - RNA, 19 nt, Artificial Sequence
  Synthesized RNAi sequence
uuaucgaagcuugcguuug

SEQ ID NO: 699 - RNA, 19 nt, Artificial Sequence
  Synthesized RNAi sequence
uuaucuaagucacuaacug

SEQ ID NO: 700 - RNA, 19 nt, Artificial Sequence
  Synthesized RNAi sequence
uuaucuaaugucaguacac

SEQ ID NO: 701 - RNA, 19 nt, Artificial Sequence
  Synthesized RNAi sequence
uuaucuaaugucaguacac

SEQ ID NO: 702 - RNA, 19 nt, Artificial Sequence
  Synthesized RNAi sequence
uuaucuucaaccuaggacu

SEQ ID NO: 703 - RNA, 19 nt, Artificial Sequence
  Synthesized RNAi sequence
uuaugauccuuugcaaccu

SEQ ID NO: 704 - RNA, 19 nt, Artificial Sequence
  Synthesized RNAi sequence
uuaugaugaaccgacgacg

SEQ ID NO: 705 - RNA, 19 nt, Artificial Sequence
  Synthesized RNAi sequence
uuaugcuuggaacaggaag

SEQ ID NO: 706 - RNA, 19 nt, Artificial Sequence
  Synthesized RNAi sequence
uuaugcuuuagucuacuuc

SEQ ID NO: 707 - RNA, 19 nt, Artificial Sequence
  Synthesized RNAi sequence
uuauguacaacaccuagcu

SEQ ID NO: 708 - RNA, 19 nt, Artificial Sequence
  Synthesized RNAi sequence
uuauguacaacaccuagcu

SEQ ID NO: 709 - RNA, 19 nt, Artificial Sequence
  Synthesized RNAi sequence
uuauguuagacuucucagu

SEQ ID NO: 710 - RNA, 19 nt, Artificial Sequence
  Synthesized RNAi sequence
uuauuaacaauaaguaggg

SEQ ID NO: 711 - RNA, 19 nt, Artificial Sequence
  Synthesized RNAi sequence
uuauuaauuauacugcgug

SEQ ID NO: 712 - RNA, 19 nt, Artificial Sequence
  Synthesized RNAi sequence
uuauuagaguaagcaacug

SEQ ID NO: 713 - RNA, 19 nt, Artificial Sequence
  Synthesized RNAi sequence
uuauuauguuagacuucuc

SEQ ID NO: 714 - RNA, 19 nt, Artificial Sequence
  Synthesized RNAi sequence
uuauuguuaauaacgcuac

SEQ ID NO: 715 - RNA, 19 nt, Artificial Sequence
  Synthesized RNAi sequence
uuauuuacauacaaacugc

SEQ ID NO: 716 - RNA, 19 nt, Artificial Sequence
  Synthesized RNAi sequence
uucaaagacuucuucaacu

SEQ ID NO: 717 - RNA, 19 nt, Artificial Sequence
  Synthesized RNAi sequence
uucaaagacuucuucaacu

SEQ ID NO: 718 - RNA, 19 nt, Artificial Sequence
  Synthesized RNAi sequence
uucaacaaagugacacuug

SEQ ID NO: 719 - RNA, 19 nt, Artificial Sequence
  Synthesized RNAi sequence
uucaacucaggacuuguuc

SEQ ID NO: 720 - RNA, 19 nt, Artificial Sequence
  Synthesized RNAi sequence
uucaacuuuguuauaggug

SEQ ID NO: 721 - RNA, 19 nt, Artificial Sequence
  Synthesized RNAi sequence
uucaagaacuuuacucucc

SEQ ID NO: 722 - RNA, 19 nt, Artificial Sequence
  Synthesized RNAi sequence
uucaagacaacuuccucug

SEQ ID NO: 723 - RNA, 19 nt, Artificial Sequence
  Synthesized RNAi sequence
uucaagacucacuuucuuc

SEQ ID NO: 724 - RNA, 19 nt, Artificial Sequence
  Synthesized RNAi sequence
uucaagacuuguaaauugc

SEQ ID NO: 725 - RNA, 19 nt, Artificial Sequence
  Synthesized RNAi sequence
uucacuucagacuauuacc

SEQ ID NO: 726 - RNA, 19 nt, Artificial Sequence
  Synthesized RNAi sequence
uucaguacaucgauaucgg

SEQ ID NO: 727 - RNA, 19 nt, Artificial Sequence
  Synthesized RNAi sequence
uucaguacaucgauaucgg

SEQ ID NO: 728 - RNA, 19 nt, Artificial Sequence
  Synthesized RNAi sequence
uucauaagcaacagaaccu

SEQ ID NO: 729 - RNA, 19 nt, Artificial Sequence
  Synthesized RNAi sequence
uucauaauuaggguuaagc

SEQ ID NO: 730 - RNA, 19 nt, Artificial Sequence
  Synthesized RNAi sequence
uucaugcagaucaacuuac

SEQ ID NO: 731 - RNA, 19 nt, Artificial Sequence
  Synthesized RNAi sequence
uucauugcuucuuucagac

SEQ ID NO: 732 - RNA, 19 nt, Artificial Sequence
  Synthesized RNAi sequence
uucauuuagaucguuaagu

SEQ ID NO: 733 - RNA, 19 nt, Artificial Sequence
  Synthesized RNAi sequence
uuccucuguuaacacuucu

SEQ ID NO: 734 - RNA, 19 nt, Artificial Sequence
  Synthesized RNAi sequence
uucgaguucugcuaccagc

SEQ ID NO: 735 - RNA, 19 nt, Artificial Sequence
  Synthesized RNAi sequence
uucguuuagagaacagauc

SEQ ID NO: 736 - RNA, 19 nt, Artificial Sequence
  Synthesized RNAi sequence
uucuaaagaaggauaggug

SEQ ID NO: 737 - RNA, 19 nt, Artificial Sequence
  Synthesized RNAi sequence
uucuaacauagugcucuug

SEQ ID NO: 738 - RNA, 19 nt, Artificial Sequence
  Synthesized RNAi sequence
uucuaauaaagcacuaccc

SEQ ID NO: 739 - RNA, 19 nt, Artificial Sequence
  Synthesized RNAi sequence
uucuacaauuugccuaugc

SEQ ID NO: 740 - RNA, 19 nt, Artificial Sequence
  Synthesized RNAi sequence
uucuacaucacuauaaaca

SEQ ID NO: 741 - RNA, 19 nt, Artificial Sequence
  Synthesized RNAi sequence
uucuacaucugaaucaaca

SEQ ID NO: 742 - RNA, 19 nt, Artificial Sequence
  Synthesized RNAi sequence
uucuagaaagugaacucgu

SEQ ID NO: 743 - RNA, 19 nt, Artificial Sequence
  Synthesized RNAi sequence
uucuagaauuuguacuucu

SEQ ID NO: 744 - RNA, 19 nt, Artificial Sequence
  Synthesized RNAi sequence
uucucuaacaucaccuaac

SEQ ID NO: 745 - RNA, 19 nt, Artificial Sequence
  Synthesized RNAi sequence
uucuguaccgaguucaacu

SEQ ID NO: 746 - RNA, 19 nt, Artificial Sequence
  Synthesized RNAi sequence
uucuuauggaccuugaagg

SEQ ID NO: 747 - RNA, 19 nt, Artificial Sequence
  Synthesized RNAi sequence
uucuucaauugucauuacu

SEQ ID NO: 748 - RNA, 19 nt, Artificial Sequence
  Synthesized RNAi sequence
uucuucacaaucaccuucu

SEQ ID NO: 749 - RNA, 19 nt, Artificial Sequence
  Synthesized RNAi sequence
uucuucucuggauuuaaca

SEQ ID NO: 750 - RNA, 19 nt, Artificial Sequence
  Synthesized RNAi sequence
uucuucuucacaaucaccu

SEQ ID NO: 751 - RNA, 19 nt, Artificial Sequence
  Synthesized RNAi sequence
uucuucuucauccucaucu

SEQ ID NO: 752 - RNA, 19 nt, Artificial Sequence
  Synthesized RNAi sequence
uucuucuugcucuucuuca

SEQ ID NO: 753 - RNA, 19 nt, Artificial Sequence
  Synthesized RNAi sequence
uucuugacauuacaccaug

SEQ ID NO: 754 - RNA, 19 nt, Artificial Sequence
  Synthesized RNAi sequence
uucuuucagacuguuugcg

SEQ ID NO: 755 - RNA, 19 nt, Artificial Sequence
  Synthesized RNAi sequence
uugaaacuacaaauggaac

SEQ ID NO: 756 - RNA, 19 nt, Artificial Sequence
  Synthesized RNAi sequence
uugaaacuacaaauggaac

SEQ ID NO: 757 - RNA, 19 nt, Artificial Sequence
  Synthesized RNAi sequence
uugaaauccuucacuguag

SEQ ID NO: 758 - RNA, 19 nt, Artificial Sequence
  Synthesized RNAi sequence
uugaacaacaucacccacu

SEQ ID NO: 759 - RNA, 19 nt, Artificial Sequence
  Synthesized RNAi sequence
uugaacaauggaaccuagu

SEQ ID NO: 760 - RNA, 19 nt, Artificial Sequence
  Synthesized RNAi sequence
uugaacaucaaucauaaac

SEQ ID NO: 761 - RNA, 19 nt, Artificial Sequence
  Synthesized RNAi sequence
uugaaccuuucuacaagcc

SEQ ID NO: 762 - RNA, 19 nt, Artificial Sequence
  Synthesized RNAi sequence
uugaacuucuacaugcacc

SEQ ID NO: 763 - RNA, 19 nt, Artificial Sequence
  Synthesized RNAi sequence
uugaagagcagcagaagug

SEQ ID NO: 764 - RNA, 19 nt, Artificial Sequence
  Synthesized RNAi sequence
uugaaguugaaauugacac

SEQ ID NO: 765 - RNA, 19 nt, Artificial Sequence
  Synthesized RNAi sequence
uugaauagucuugauuaug

SEQ ID NO: 766 - RNA, 19 nt, Artificial Sequence
  Synthesized RNAi sequence
uugaauaugucucucagcc

SEQ ID NO: 767 - RNA, 19 nt, Artificial Sequence
  Synthesized RNAi sequence
uugaaugucuucaccuuug

SEQ ID NO: 768 - RNA, 19 nt, Artificial Sequence
  Synthesized RNAi sequence
uugaauuagugguguaaac

SEQ ID NO: 769 - RNA, 19 nt, Artificial Sequence
  Synthesized RNAi sequence
uugacuaucaucaucuaac

SEQ ID NO: 770 - RNA, 19 nt, Artificial Sequence
  Synthesized RNAi sequence
uugagauucuugacauuac

SEQ ID NO: 771 - RNA, 19 nt, Artificial Sequence
  Synthesized RNAi sequence
uugaguagauuaaagaacc

SEQ ID NO: 772 - RNA, 19 nt, Artificial Sequence
  Synthesized RNAi sequence
uugaguuauaguagggaug

SEQ ID NO: 773 - RNA, 19 nt, Artificial Sequence
  Synthesized RNAi sequence
uugaguuauaguagggaug

SEQ ID NO: 774 - RNA, 19 nt, Artificial Sequence
  Synthesized RNAi sequence
uugauaacccuguccuacc

SEQ ID NO: 775 - RNA, 19 nt, Artificial Sequence
  Synthesized RNAi sequence
uugauaauguuguugagug

SEQ ID NO: 776 - RNA, 19 nt, Artificial Sequence
  Synthesized RNAi sequence
uugauaauguuguugagug

SEQ ID NO: 777 - RNA, 19 nt, Artificial Sequence
  Synthesized RNAi sequence
uugauaauuugcaacauug

SEQ ID NO: 778 - RNA, 19 nt, Artificial Sequence
  Synthesized RNAi sequence
uugauagguugaucacagg

SEQ ID NO: 779 - RNA, 19 nt, Artificial Sequence
  Synthesized RNAi sequence
uugaucacaggcagacuuc

SEQ ID NO: 780 - RNA, 19 nt, Artificial Sequence
  Synthesized RNAi sequence
uugaucuaaagcauuacca

SEQ ID NO: 781 - RNA, 19 nt, Artificial Sequence
  Synthesized RNAi sequence
uugaucugcaugaauagca

SEQ ID NO: 782 - RNA, 19 nt, Artificial Sequence
  Synthesized RNAi sequence
uugaugaaacugucuauug

SEQ ID NO: 783 - RNA, 19 nt, Artificial Sequence
  Synthesized RNAi sequence
uugaugaaacugucuauug

SEQ ID NO: 784 - RNA, 19 nt, Artificial Sequence
  Synthesized RNAi sequence
uugaugaacacauagggcu

SEQ ID NO: 785 - RNA, 19 nt, Artificial Sequence
  Synthesized RNAi sequence
uugauuacaucauaaaccu

SEQ ID NO: 786 - RNA, 19 nt, Artificial Sequence
  Synthesized RNAi sequence
uugauuauggaauuuaagg

SEQ ID NO: 787 - RNA, 19 nt, Artificial Sequence
  Synthesized RNAi sequence
uugauucuaagguuggugg

SEQ ID NO: 788 - RNA, 19 nt, Artificial Sequence
  Synthesized RNAi sequence
uugauuuaggugacaucuc

SEQ ID NO: 789 - RNA, 19 nt, Artificial Sequence
  Synthesized RNAi sequence
uugcaaaggaucauaaacu

SEQ ID NO: 790 - RNA, 19 nt, Artificial Sequence
  Synthesized RNAi sequence
uugcaacuugucauaaagg

SEQ ID NO: 791 - RNA, 19 nt, Artificial Sequence
  Synthesized RNAi sequence
uugcacuucagccucaacu

SEQ ID NO: 792 - RNA, 19 nt, Artificial Sequence
  Synthesized RNAi sequence
uugcagaugaaacaucaug

SEQ ID NO: 793 - RNA, 19 nt, Artificial Sequence
  Synthesized RNAi sequence
uugcauuaaagucaguaac

SEQ ID NO: 794 - RNA, 19 nt, Artificial Sequence
  Synthesized RNAi sequence
uugcuguaguugucucaag

SEQ ID NO: 795 - RNA, 19 nt, Artificial Sequence
  Synthesized RNAi sequence
uuggaacaggaagagaauc

SEQ ID NO: 796 - RNA, 19 nt, Artificial Sequence
  Synthesized RNAi sequence
uuggaaucuugauuacauc

SEQ ID NO: 797 - RNA, 19 nt, Artificial Sequence
  Synthesized RNAi sequence
uugguaucauaacaauaug

SEQ ID NO: 798 - RNA, 19 nt, Artificial Sequence
  Synthesized RNAi sequence
uuguaaauugcggacauac

SEQ ID NO: 799 - RNA, 19 nt, Artificial Sequence
  Synthesized RNAi sequence
uuguaaauugcggacauac

SEQ ID NO: 800 - RNA, 19 nt, Artificial Sequence
  Synthesized RNAi sequence
uuguaacaagcuaacacug

SEQ ID NO: 801 - RNA, 19 nt, Artificial Sequence
  Synthesized RNAi sequence
uuguaacuucuucaacaca

SEQ ID NO: 802 - RNA, 19 nt, Artificial Sequence
  Synthesized RNAi sequence
uuguaagauuaacacacug

SEQ ID NO: 803 - RNA, 19 nt, Artificial Sequence
  Synthesized RNAi sequence
uuguacaaucuuuauacgc

SEQ ID NO: 804 - RNA, 19 nt, Artificial Sequence
  Synthesized RNAi sequence
uuguacacaauuaaaccgu

SEQ ID NO: 805 - RNA, 19 nt, Artificial Sequence
  Synthesized RNAi sequence
uuguacauucgacucuugu

SEQ ID NO: 806 - RNA, 19 nt, Artificial Sequence
  Synthesized RNAi sequence
uuguauccuaugauuucac

SEQ ID NO: 807 - RNA, 19 nt, Artificial Sequence
  Synthesized RNAi sequence
uuguauucugaggacuuug

SEQ ID NO: 808 - RNA, 19 nt, Artificial Sequence
  Synthesized RNAi sequence
uuguccauaugucauugac

SEQ ID NO: 809 - RNA, 19 nt, Artificial Sequence
  Synthesized RNAi sequence
uugucugauuguccucacu

SEQ ID NO: 810 - RNA, 19 nt, Artificial Sequence
  Synthesized RNAi sequence
uugucuuguaggcuugaug

SEQ ID NO: 811 - RNA, 19 nt, Artificial Sequence
  Synthesized RNAi sequence
uuguuaaguacccaucuac

SEQ ID NO: 812 - RNA, 19 nt, Artificial Sequence
  Synthesized RNAi sequence
uuguuauccagaaagguac

SEQ ID NO: 813 - RNA, 19 nt, Artificial Sequence
  Synthesized RNAi sequence
uuguucaacagcuauucca

SEQ ID NO: 814 - RNA, 19 nt, Artificial Sequence
  Synthesized RNAi sequence
uuguucuuguggauccugc

SEQ ID NO: 815 - RNA, 19 nt, Artificial Sequence
  Synthesized RNAi sequence
uuguugacuaucaucaucu

SEQ ID NO: 816 - RNA, 19 nt, Artificial Sequence
  Synthesized RNAi sequence
uuguugagucacauauguc

SEQ ID NO: 817 - RNA, 19 nt, Artificial Sequence
  Synthesized RNAi sequence
uuguuguaccucgguaaac

SEQ ID NO: 818 - RNA, 19 nt, Artificial Sequence
  Synthesized RNAi sequence
uuguuguuacaacauuaac

SEQ ID NO: 819 - RNA, 19 nt, Artificial Sequence
  Synthesized RNAi sequence
uuguuuaggaagucuaauc

SEQ ID NO: 820 - RNA, 19 nt, Artificial Sequence
  Synthesized RNAi sequence
uuguuucucuaacaucacc

SEQ ID NO: 821 - RNA, 19 nt, Artificial Sequence
  Synthesized RNAi sequence
uuuaaaugaaucucucauc

SEQ ID NO: 822 - RNA, 19 nt, Artificial Sequence
  Synthesized RNAi sequence
uuuaaauugaucuccaggc

SEQ ID NO: 823 - RNA, 19 nt, Artificial Sequence
  Synthesized RNAi sequence
uuuaacauauagugaaccg

SEQ ID NO: 824 - RNA, 19 nt, Artificial Sequence
  Synthesized RNAi sequence
uuuaacauauagugaaccg

SEQ ID NO: 825 - RNA, 19 nt, Artificial Sequence
  Synthesized RNAi sequence
uuuaacuagcauuguaugu

SEQ ID NO: 826 - RNA, 19 nt, Artificial Sequence
  Synthesized RNAi sequence
uuuaacuagcauuguaugu

SEQ ID NO: 827 - RNA, 19 nt, Artificial Sequence
  Synthesized RNAi sequence
uuuaacugcaacuuccgca

SEQ ID NO: 828 - RNA, 19 nt, Artificial Sequence
  Synthesized RNAi sequence
uuuaagaaucauacaucac

SEQ ID NO: 829 - RNA, 19 nt, Artificial Sequence
  Synthesized RNAi sequence
uuuaagacauucaacaaca

SEQ ID NO: 830 - RNA, 19 nt, Artificial Sequence
  Synthesized RNAi sequence
uuuaagauguugacgugcc

SEQ ID NO: 831 - RNA, 19 nt, Artificial Sequence
  Synthesized RNAi sequence
uuuaagcacugucuuugcc

SEQ ID NO: 832 - RNA, 19 nt, Artificial Sequence
  Synthesized RNAi sequence
uuuaaguauaaugucuccu

SEQ ID NO: 833 - RNA, 19 nt, Artificial Sequence
  Synthesized RNAi sequence
uuuaauagcuucuuaggag

SEQ ID NO: 834 - RNA, 19 nt, Artificial Sequence
  Synthesized RNAi sequence
uuuaauagcuucuuaggag

SEQ ID NO: 835 - RNA, 19 nt, Artificial Sequence
  Synthesized RNAi sequence
uuuaaugcacucaagaggg

SEQ ID NO: 836 - RNA, 19 nt, Artificial Sequence
  Synthesized RNAi sequence
uuuaaugcugacauguacc

SEQ ID NO: 837 - RNA, 19 nt, Artificial Sequence
  Synthesized RNAi sequence
uuuaauuaugcuuauuauc

SEQ ID NO: 838 - RNA, 19 nt, Artificial Sequence
  Synthesized RNAi sequence
uuuaauucaacagaacuuc

SEQ ID NO: 839 - RNA, 19 nt, Artificial Sequence
  Synthesized RNAi sequence
uuuaauucaacagaacuuc

SEQ ID NO: 840 - RNA, 19 nt, Artificial Sequence
  Synthesized RNAi sequence
uuuaauucuagaauuugua

SEQ ID NO: 841 - RNA, 19 nt, Artificial Sequence
  Synthesized RNAi sequence
uuuaauugaauugugcgug

SEQ ID NO: 842 - RNA, 19 nt, Artificial Sequence
  Synthesized RNAi sequence
uuuaauugaauugugcgug

SEQ ID NO: 843 - RNA, 19 nt, Artificial Sequence
  Synthesized RNAi sequence
uuuaauuuguaaguuguug

SEQ ID NO: 844 - RNA, 19 nt, Artificial Sequence
  Synthesized RNAi sequence
uuuacaagcuuaaagaaug

SEQ ID NO: 845 - RNA, 19 nt, Artificial Sequence
  Synthesized RNAi sequence
uuuacauucaacucaggac

SEQ ID NO: 846 - RNA, 19 nt, Artificial Sequence
  Synthesized RNAi sequence
uuuaccgacacucuuaaca

SEQ ID NO: 847 - RNA, 19 nt, Artificial Sequence
  Synthesized RNAi sequence
uuuacuaaugucuaugcag

SEQ ID NO: 848 - RNA, 19 nt, Artificial Sequence
  Synthesized RNAi sequence
uuuacuaucugcaucuaca

SEQ ID NO: 849 - RNA, 19 nt, Artificial Sequence
  Synthesized RNAi sequence
uuuacuaucugcaucuaca

SEQ ID NO: 850 - RNA, 19 nt, Artificial Sequence
  Synthesized RNAi sequence
uuuagcuccaccaauaaug

SEQ ID NO: 851 - RNA, 19 nt, Artificial Sequence
  Synthesized RNAi sequence
uuuagcuucuuccacaaug

SEQ ID NO: 852 - RNA, 19 nt, Artificial Sequence
  Synthesized RNAi sequence
uuuaguaacaucagcucca

SEQ ID NO: 853 - RNA, 19 nt, Artificial Sequence
  Synthesized RNAi sequence
uuuaguaagacguugacgu

SEQ ID NO: 854 - RNA, 19 nt, Artificial Sequence
  Synthesized RNAi sequence
uuuaguaagacguugacgu

SEQ ID NO: 855 - RNA, 19 nt, Artificial Sequence
  Synthesized RNAi sequence
uuuaguagcagcaagauua

SEQ ID NO: 856 - RNA, 19 nt, Artificial Sequence
  Synthesized RNAi sequence
uuuagucaaauucucagug

SEQ ID NO: 857 - RNA, 19 nt, Artificial Sequence
  Synthesized RNAi sequence
uuuagucuacuucuugcag

SEQ ID NO: 858 - RNA, 19 nt, Artificial Sequence
  Synthesized RNAi sequence
uuuaguuacacgauaacca

SEQ ID NO: 859 - RNA, 19 nt, Artificial Sequence
  Synthesized RNAi sequence
uuuauaauccaaaccuuuc

SEQ ID NO: 860 - RNA, 19 nt, Artificial Sequence
  Synthesized RNAi sequence
uuuaucaggauguuaacug

SEQ ID NO: 861 - RNA, 19 nt, Artificial Sequence
  Synthesized RNAi sequence
uuuaucauuguagauguca

SEQ ID NO: 862 - RNA, 19 nt, Artificial Sequence
  Synthesized RNAi sequence
uuuaucauuguagauguca

SEQ ID NO: 863 - RNA, 19 nt, Artificial Sequence
  Synthesized RNAi sequence
uuuaucuaacuccuccuug

SEQ ID NO: 864 - RNA, 19 nt, Artificial Sequence
  Synthesized RNAi sequence
uuuaucuaagucacuaacu

SEQ ID NO: 865 - RNA, 19 nt, Artificial Sequence
  Synthesized RNAi sequence
uuuaugauccuuugcaacc

SEQ ID NO: 866 - RNA, 19 nt, Artificial Sequence
  Synthesized RNAi sequence
uuuauguaacaauuuagcu

SEQ ID NO: 867 - RNA, 19 nt, Artificial Sequence
  Synthesized RNAi sequence
uuuaugucuacagcacccu

SEQ ID NO: 868 - RNA, 19 nt, Artificial Sequence
  Synthesized RNAi sequence
uuuauuuacaagcuuaaag

SEQ ID NO: 869 - RNA, 19 nt, Artificial Sequence
  Synthesized RNAi sequence
uuuauuuacauacaaacug

SEQ ID NO: 870 - RNA, 19 nt, Artificial Sequence
  Synthesized RNAi sequence
uuucaaauccuguaaaucg

SEQ ID NO: 871 - RNA, 19 nt, Artificial Sequence
  Synthesized RNAi sequence
uuucaacuucuacuaagcc

SEQ ID NO: 872 - RNA, 19 nt, Artificial Sequence
  Synthesized RNAi sequence
uuucaguacagguguuagc

SEQ ID NO: 873 - RNA, 19 nt, Artificial Sequence
  Synthesized RNAi sequence
uuucauaagcaacagaacc

SEQ ID NO: 874 - RNA, 19 nt, Artificial Sequence
  Synthesized RNAi sequence
uuucauaagcacucuuaag

SEQ ID NO: 875 - RNA, 19 nt, Artificial Sequence
  Synthesized RNAi sequence
uuucuacaucacuauaaac

SEQ ID NO: 876 - RNA, 19 nt, Artificial Sequence
  Synthesized RNAi sequence
uuucuacaucugaaucaac

SEQ ID NO: 877 - RNA, 19 nt, Artificial Sequence
  Synthesized RNAi sequence
uuucucuguucaacugaag

SEQ ID NO: 878 - RNA, 19 nt, Artificial Sequence
  Synthesized RNAi sequence
uuucugaacaugacuacca

SEQ ID NO: 879 - RNA, 19 nt, Artificial Sequence
  Synthesized RNAi sequence
uuucuguacaaacaacacc

SEQ ID NO: 880 - RNA, 19 nt, Artificial Sequence
  Synthesized RNAi sequence
uuucuguacaaucccuuug

SEQ ID NO: 881 - RNA, 19 nt, Artificial Sequence
  Synthesized RNAi sequence
uuucugugaggaacuuagu

SEQ ID NO: 882 - RNA, 19 nt, Artificial Sequence
  Synthesized RNAi sequence
uuucuguucaccaauauuc

SEQ ID NO: 883 - RNA, 19 nt, Artificial Sequence
  Synthesized RNAi sequence
uuucuuaggaaucaucaca

SEQ ID NO: 884 - RNA, 19 nt, Artificial Sequence
  Synthesized RNAi sequence
uuucuuaggaaucaucaca

SEQ ID NO: 885 - RNA, 19 nt, Artificial Sequence
  Synthesized RNAi sequence
uuucuuauaaccaguuaac

SEQ ID NO: 886 - RNA, 19 nt, Artificial Sequence
  Synthesized RNAi sequence
uuucuuauggaccuugaag

SEQ ID NO: 887 - RNA, 19 nt, Artificial Sequence
  Synthesized RNAi sequence
uuucuuccacagcaagugc

SEQ ID NO: 888 - RNA, 19 nt, Artificial Sequence
  Synthesized RNAi sequence
uuucuuggaagcgacaaca

SEQ ID NO: 889 - RNA, 19 nt, Artificial Sequence
  Synthesized RNAi sequence
uuucuuggaagcgacaaca

SEQ ID NO: 890 - RNA, 19 nt, Artificial Sequence
  Synthesized RNAi sequence
uuucuuuagaaguuauaug

SEQ ID NO: 891 - RNA, 19 nt, Artificial Sequence
  Synthesized RNAi sequence
uuugaacuucuacaugcac

SEQ ID NO: 892 - RNA, 19 nt, Artificial Sequence
  Synthesized RNAi sequence
uuugaagcaaggugaaauc

SEQ ID NO: 893 - RNA, 19 nt, Artificial Sequence
  Synthesized RNAi sequence
uuugaauaguaguugucug

SEQ ID NO: 894 - RNA, 19 nt, Artificial Sequence
  Synthesized RNAi sequence
uuugaauaugucucucagc

SEQ ID NO: 895 - RNA, 19 nt, Artificial Sequence
  Synthesized RNAi sequence
uuugagcagaaagaggucc

SEQ ID NO: 896 - RNA, 19 nt, Artificial Sequence
  Synthesized RNAi sequence
uuugagugcgugacaaaug

SEQ ID NO: 897 - RNA, 19 nt, Artificial Sequence
  Synthesized RNAi sequence
uuugagugugaagguauug

SEQ ID NO: 898 - RNA, 19 nt, Artificial Sequence
  Synthesized RNAi sequence
uuugauaacccuguccuac

SEQ ID NO: 899 - RNA, 19 nt, Artificial Sequence
  Synthesized RNAi sequence
uuugauauuaucacauaca

SEQ ID NO: 900 - RNA, 19 nt, Artificial Sequence
  Synthesized RNAi sequence
uuugcaaccugaauuagac

SEQ ID NO: 901 - RNA, 19 nt, Artificial Sequence
  Synthesized RNAi sequence
uuugcgagcaagaacaagu

SEQ ID NO: 902 - RNA, 19 nt, Artificial Sequence
  Synthesized RNAi sequence
uuugcgagcaagaacaagu

SEQ ID NO: 903 - RNA, 19 nt, Artificial Sequence
  Synthesized RNAi sequence
uuugcuuguuccaauuacu

SEQ ID NO: 904 - RNA, 19 nt, Artificial Sequence
  Synthesized RNAi sequence
uuugcuuguuccaauuacu

SEQ ID NO: 905 - RNA, 19 nt, Artificial Sequence
  Synthesized RNAi sequence
uuuguaaauuuguuugacu

SEQ ID NO: 906 - RNA, 19 nt, Artificial Sequence
  Synthesized RNAi sequence
uuuguaacaguuuacucac

SEQ ID NO: 907 - RNA, 19 nt, Artificial Sequence
  Synthesized RNAi sequence
uuuguacaaucuuuauacg

SEQ ID NO: 908 - RNA, 19 nt, Artificial Sequence
  Synthesized RNAi sequence
uuuguacacaauuaaaccg

SEQ ID NO: 909 - RNA, 19 nt, Artificial Sequence
  Synthesized RNAi sequence
uuuguagcuuguuuaccac

SEQ ID NO: 910 - RNA, 19 nt, Artificial Sequence
  Synthesized RNAi sequence
uuugucugacuucaucacc

SEQ ID NO: 911 - RNA, 19 nt, Artificial Sequence
  Synthesized RNAi sequence
uuugucuucuacaauuugc

SEQ ID NO: 912 - RNA, 19 nt, Artificial Sequence
  Synthesized RNAi sequence
uuugucuuguucaacagcu

SEQ ID NO: 913 - RNA, 19 nt, Artificial Sequence
  Synthesized RNAi sequence
uuuguuaacauuugggccg

SEQ ID NO: 914 - RNA, 19 nt, Artificial Sequence
  Synthesized RNAi sequence
uuuguuugcaacuugcugu

SEQ ID NO: 915 - RNA, 22 nt, Artificial Sequence
  Synthesized RNAi sequence
aaacagcuguaccuggugcaac

SEQ ID NO: 916 - RNA, 22 nt, Artificial Sequence
  Synthesized RNAi sequence
aaagaauaggaagacaacugaa

SEQ ID NO: 917 - RNA, 22 nt, Artificial Sequence
  Synthesized RNAi sequence
aaagacauaacagcaguacccc

SEQ ID NO: 918 - RNA, 22 nt, Artificial Sequence
  Synthesized RNAi sequence
aaagauuaggcauagcaacacc

SEQ ID NO: 919 - RNA, 22 nt, Artificial Sequence
  Synthesized RNAi sequence
aaaggcuguccaccaugcgaag

SEQ ID NO: 920 - RNA, 22 nt, Artificial Sequence
  Synthesized RNAi sequence
aaagucauuaagaucugaaucg

SEQ ID NO: 921 - RNA, 22 nt, Artificial Sequence
  Synthesized RNAi sequence
aaaguugaaucugcaucagaga

SEQ ID NO: 922 - RNA, 22 nt, Artificial Sequence
  Synthesized RNAi sequence
aaauauugacacaguugaguau

SEQ ID NO: 923 - RNA, 22 nt, Artificial Sequence
  Synthesized RNAi sequence
aaaucauaucauugauuugacc

SEQ ID NO: 924 - RNA, 22 nt, Artificial Sequence
  Synthesized RNAi sequence
aaauguauaacucucauauuau

SEQ ID NO: 925 - RNA, 22 nt, Artificial Sequence
  Synthesized RNAi sequence
aaauuuacucaugucaaauaaa

SEQ ID NO: 926 - RNA, 22 nt, Artificial Sequence
  Synthesized RNAi sequence
aacaaaggcuguccaccaugcg

SEQ ID NO: 927 - RNA, 22 nt, Artificial Sequence
  Synthesized RNAi sequence
aacaacucuguuguuuucucua

SEQ ID NO: 928 - RNA, 22 nt, Artificial Sequence
  Synthesized RNAi sequence
aacaagaacaucacuagaaaua

SEQ ID NO: 929 - RNA, 22 nt, Artificial Sequence
  Synthesized RNAi sequence
aacagcaguaccccuuaauuua

SEQ ID NO: 930 - RNA, 22 nt, Artificial Sequence
  Synthesized RNAi sequence
aacagcuguaccuggugcaacu

SEQ ID NO: 931 - RNA, 22 nt, Artificial Sequence
  Synthesized RNAi sequence
aacaucacuagaaauaacaacu

SEQ ID NO: 932 - RNA, 22 nt, Artificial Sequence
  Synthesized RNAi sequence
aaccacugucuuaaaacagcug

SEQ ID NO: 933 - RNA, 22 nt, Artificial Sequence
  Synthesized RNAi sequence
aaccagcaccaaaauguauaac

SEQ ID NO: 934 - RNA, 22 nt, Artificial Sequence
  Synthesized RNAi sequence
aaccaucuauuuguucgcgugg

SEQ ID NO: 935 - RNA, 22 nt, Artificial Sequence
  Synthesized RNAi sequence
aacuccuuuaucagaaccagca

SEQ ID NO: 936 - RNA, 22 nt, Artificial Sequence
  Synthesized RNAi sequence
aacucucauauuauaggguaca

SEQ ID NO: 937 - RNA, 22 nt, Artificial Sequence
  Synthesized RNAi sequence
aacucuguuguuuucucuaauu

SEQ ID NO: 938 - RNA, 22 nt, Artificial Sequence
  Synthesized RNAi sequence
aagaacaucacuagaaauaaca

SEQ ID NO: 939 - RNA, 22 nt, Artificial Sequence
  Synthesized RNAi sequence
aagaagagauaaaaucauauca

SEQ ID NO: 940 - RNA, 22 nt, Artificial Sequence
  Synthesized RNAi sequence
aagaauaggaagacaacugaau

SEQ ID NO: 941 - RNA, 22 nt, Artificial Sequence
  Synthesized RNAi sequence
aagaauguucuguuaucuuuau

SEQ ID NO: 942 - RNA, 22 nt, Artificial Sequence
  Synthesized RNAi sequence
aagacaacugaauuggauuugu

SEQ ID NO: 943 - RNA, 22 nt, Artificial Sequence
  Synthesized RNAi sequence
aagacauaacagcaguaccccu

SEQ ID NO: 944 - RNA, 22 nt, Artificial Sequence
  Synthesized RNAi sequence
aagagauaaaaucauaucauug

SEQ ID NO: 945 - RNA, 22 nt, Artificial Sequence
  Synthesized RNAi sequence
aagagcuagcuuuuguuguaua

SEQ ID NO: 946 - RNA, 22 nt, Artificial Sequence
  Synthesized RNAi sequence
aagaucagcauuccaagaaugu

SEQ ID NO: 947 - RNA, 22 nt, Artificial Sequence
  Synthesized RNAi sequence
aagaucugaaucgacaagcagc

SEQ ID NO: 948 - RNA, 22 nt, Artificial Sequence
  Synthesized RNAi sequence
aagauuaggcauagcaacaccc

SEQ ID NO: 949 - RNA, 22 nt, Artificial Sequence
  Synthesized RNAi sequence
aagcagcguacccguaggcaac

SEQ ID NO: 950 - RNA, 22 nt, Artificial Sequence
  Synthesized RNAi sequence
aaggcuguccaccaugcgaagu

SEQ ID NO: 951 - RNA, 22 nt, Artificial Sequence
  Synthesized RNAi sequence
aaggggaaauuuacucauguca

SEQ ID NO: 952 - RNA, 22 nt, Artificial Sequence
  Synthesized RNAi sequence
aaggucacacuuuucuaauagc

SEQ ID NO: 953 - RNA, 22 nt, Artificial Sequence
  Synthesized RNAi sequence
aagucauuaagaucugaaucga

SEQ ID NO: 954 - RNA, 22 nt, Artificial Sequence
  Synthesized RNAi sequence
aagucuaccuuuacuaagaaga

SEQ ID NO: 955 - RNA, 22 nt, Artificial Sequence
  Synthesized RNAi sequence
aaguugaaucugcaucagagac

SEQ ID NO: 956 - RNA, 22 nt, Artificial Sequence
  Synthesized RNAi sequence
aauaaagaauaggaagacaacu

SEQ ID NO: 957 - RNA, 22 nt, Artificial Sequence
  Synthesized RNAi sequence
aauaaugagaucccauuuauua

SEQ ID NO: 958 - RNA, 22 nt, Artificial Sequence
  Synthesized RNAi sequence
aauagcauucuuugcauuuugu

SEQ ID NO: 959 - RNA, 22 nt, Artificial Sequence
  Synthesized RNAi sequence
aauaggaagacaacugaauugg

SEQ ID NO: 960 - RNA, 22 nt, Artificial Sequence
  Synthesized RNAi sequence
aauauguaauuugcaugcauga

SEQ ID NO: 961 - RNA, 22 nt, Artificial Sequence
  Synthesized RNAi sequence
aauauugacacaguugaguaua

SEQ ID NO: 962 - RNA, 22 nt, Artificial Sequence
  Synthesized RNAi sequence
aaucaaaguugaaucugcauca

SEQ ID NO: 963 - RNA, 22 nt, Artificial Sequence
  Synthesized RNAi sequence
aaucauaucauugauuugaccu

SEQ ID NO: 964 - RNA, 22 nt, Artificial Sequence
  Synthesized RNAi sequence
aaucgacaagcagcguacccgu

SEQ ID NO: 965 - RNA, 22 nt, Artificial Sequence
  Synthesized RNAi sequence
aaucugcaucagagacaaaguc

SEQ ID NO: 966 - RNA, 22 nt, Artificial Sequence
  Synthesized RNAi sequence
aaugagaucccauuuauuagcu

SEQ ID NO: 967 - RNA, 22 nt, Artificial Sequence
  Synthesized RNAi sequence
aauguauaacucucauauuaua

SEQ ID NO: 968 - RNA, 22 nt, Artificial Sequence
  Synthesized RNAi sequence
aauguguuuaaauauugacaca

SEQ ID NO: 969 - RNA, 22 nt, Artificial Sequence
  Synthesized RNAi sequence
aauguucuguuaucuuuauagc

SEQ ID NO: 970 - RNA, 22 nt, Artificial Sequence
  Synthesized RNAi sequence
aauguugcacuaucaccauaau

SEQ ID NO: 971 - RNA, 22 nt, Artificial Sequence
  Synthesized RNAi sequence
aauuauaagucuaccuuuacua

SEQ ID NO: 972 - RNA, 22 nt, Artificial Sequence
  Synthesized RNAi sequence
aauuggauuuguauuccuccaa

SEQ ID NO: 973 - RNA, 22 nt, Artificial Sequence
  Synthesized RNAi sequence
aauuuaaggggaaauuuacuca

SEQ ID NO: 974 - RNA, 22 nt, Artificial Sequence
  Synthesized RNAi sequence
aauuuacucaugucaaauaaag

SEQ ID NO: 975 - RNA, 22 nt, Artificial Sequence
  Synthesized RNAi sequence
aauuugcaugcaugacauaacc

SEQ ID NO: 976 - RNA, 22 nt, Artificial Sequence
  Synthesized RNAi sequence
acaaaggcuguccaccaugcga

SEQ ID NO: 977 - RNA, 22 nt, Artificial Sequence
  Synthesized RNAi sequence
acaaagucauuaagaucugaau

SEQ ID NO: 978 - RNA, 22 nt, Artificial Sequence
  Synthesized RNAi sequence
acaacucuguuguuuucucuaa

SEQ ID NO: 979 - RNA, 22 nt, Artificial Sequence
  Synthesized RNAi sequence
acaacugaauuggauuuguauu

SEQ ID NO: 980 - RNA, 22 nt, Artificial Sequence
  Synthesized RNAi sequence
acaagaacaucacuagaaauaa

SEQ ID NO: 981 - RNA, 22 nt, Artificial Sequence
  Synthesized RNAi sequence
acaagcagcguacccguaggca

SEQ ID NO: 982 - RNA, 22 nt, Artificial Sequence
  Synthesized RNAi sequence
acaaucaccaaucaaaguugaa

SEQ ID NO: 983 - RNA, 22 nt, Artificial Sequence
  Synthesized RNAi sequence
acacuuuucuaauagcauucuu

SEQ ID NO: 984 - RNA, 22 nt, Artificial Sequence
  Synthesized RNAi sequence
acagcaguaccccuuaauuuaa

SEQ ID NO: 985 - RNA, 22 nt, Artificial Sequence
  Synthesized RNAi sequence
acagcuaauguuaauguguuua

SEQ ID NO: 986 - RNA, 22 nt, Artificial Sequence
  Synthesized RNAi sequence
acaguugaguauauuuugcgac

SEQ ID NO: 987 - RNA, 22 nt, Artificial Sequence
  Synthesized RNAi sequence
acaguugcacaaucaccaauca

SEQ ID NO: 988 - RNA, 22 nt, Artificial Sequence
  Synthesized RNAi sequence
acauaacagcaguaccccuuaa

SEQ ID NO: 989 - RNA, 22 nt, Artificial Sequence
  Synthesized RNAi sequence
acauaaccaucuauuuguucgc

SEQ ID NO: 990 - RNA, 22 nt, Artificial Sequence
  Synthesized RNAi sequence
acauaucacuaauaaugagauc

SEQ ID NO: 991 - RNA, 22 nt, Artificial Sequence
  Synthesized RNAi sequence
acaucacuagaaauaacaacuc

SEQ ID NO: 992 - RNA, 22 nt, Artificial Sequence
  Synthesized RNAi sequence
acauuaguaacaaaggcugucc

SEQ ID NO: 993 - RNA, 22 nt, Artificial Sequence
  Synthesized RNAi sequence
acauucaucauuaugccuuuag

SEQ ID NO: 994 - RNA, 22 nt, Artificial Sequence
  Synthesized RNAi sequence
accaaaauguauaacucucaua

SEQ ID NO: 995 - RNA, 22 nt, Artificial Sequence
  Synthesized RNAi sequence
accaaucaaaguugaaucugca

SEQ ID NO: 996 - RNA, 22 nt, Artificial Sequence
  Synthesized RNAi sequence
accacugucuuaaaacagcugu

SEQ ID NO: 997 - RNA, 22 nt, Artificial Sequence
  Synthesized RNAi sequence
accagcaccaaaauguauaacu

SEQ ID NO: 998 - RNA, 22 nt, Artificial Sequence
  Synthesized RNAi sequence
accauaauuuugaaggucacac

SEQ ID NO: 999 - RNA, 22 nt, Artificial Sequence
  Synthesized RNAi sequence
accaucuauuuguucgcguggu

SEQ ID NO: 1000 - RNA, 22 nt, Artificial Sequence
  Synthesized RNAi sequence
accaugcgaagugucccaugag

SEQ ID NO: 1001 - RNA, 22 nt, Artificial Sequence
  Synthesized RNAi sequence
accccuuaauuuaaggggaaau

SEQ ID NO: 1002 - RNA, 22 nt, Artificial Sequence
  Synthesized RNAi sequence
acccguaggcaaccacugucuu

SEQ ID NO: 1003 - RNA, 22 nt, Artificial Sequence
  Synthesized RNAi sequence
accuccaagagcuagcuuuugu

SEQ ID NO: 1004 - RNA, 22 nt, Artificial Sequence
  Synthesized RNAi sequence
accuggugcaacuccuuuauca

SEQ ID NO: 1005 - RNA, 22 nt, Artificial Sequence
  Synthesized RNAi sequence
accuucuuuuaaagacauaaca

SEQ ID NO: 1006 - RNA, 22 nt, Artificial Sequence
  Synthesized RNAi sequence
acgcauucacauuaguaacaaa

SEQ ID NO: 1007 - RNA, 22 nt, Artificial Sequence
  Synthesized RNAi sequence
acggaaccuccaagagcuagcu

SEQ ID NO: 1008 - RNA, 22 nt, Artificial Sequence
  Synthesized RNAi sequence
acuaagaagagauaaaaucaua

SEQ ID NO: 1009 - RNA, 22 nt, Artificial Sequence
  Synthesized RNAi sequence
acuagaaauaacaacucuguug

SEQ ID NO: 1010 - RNA, 22 nt, Artificial Sequence
  Synthesized RNAi sequence
acuaucaccauaauuuugaagg

SEQ ID NO: 1011 - RNA, 22 nt, Artificial Sequence
  Synthesized RNAi sequence
acucaugucaaauaaagaauag

SEQ ID NO: 1012 - RNA, 22 nt, Artificial Sequence
  Synthesized RNAi sequence
acuccuuuaucagaaccagcac

SEQ ID NO: 1013 - RNA, 22 nt, Artificial Sequence
  Synthesized RNAi sequence
acucucauauuauaggguacag

SEQ ID NO: 1014 - RNA, 22 nt, Artificial Sequence
  Synthesized RNAi sequence
acucuguuguuuucucuaauua

SEQ ID NO: 1015 - RNA, 22 nt, Artificial Sequence
  Synthesized RNAi sequence
acugaauuggauuuguauuccu

SEQ ID NO: 1016 - RNA, 22 nt, Artificial Sequence
  Synthesized RNAi sequence
acugucuuaaaacagcuguacc

SEQ ID NO: 1017 - RNA, 22 nt, Artificial Sequence
  Synthesized RNAi sequence
agaaauaacaacucuguuguuu

SEQ ID NO: 1018 - RNA, 22 nt, Artificial Sequence
  Synthesized RNAi sequence
agaacaucacuagaaauaacaa

SEQ ID NO: 1019 - RNA, 22 nt, Artificial Sequence
  Synthesized RNAi sequence
agaaccagcaccaaaauguaua

SEQ ID NO: 1020 - RNA, 22 nt, Artificial Sequence
  Synthesized RNAi sequence
agaagagauaaaaucauaucau

SEQ ID NO: 1021 - RNA, 22 nt, Artificial Sequence
  Synthesized RNAi sequence
agaauaggaagacaacugaauu

SEQ ID NO: 1022 - RNA, 22 nt, Artificial Sequence
  Synthesized RNAi sequence
agacaaagucauuaagaucuga

SEQ ID NO: 1023 - RNA, 22 nt, Artificial Sequence
  Synthesized RNAi sequence
agacaacugaauuggauuugua

SEQ ID NO: 1024 - RNA, 22 nt, Artificial Sequence
  Synthesized RNAi sequence
agacauaacagcaguaccccuu

SEQ ID NO: 1025 - RNA, 22 nt, Artificial Sequence
  Synthesized RNAi sequence
agagacaaagucauuaagaucu

SEQ ID NO: 1026 - RNA, 22 nt, Artificial Sequence
  Synthesized RNAi sequence
agagauaaaaucauaucauuga

SEQ ID NO: 1027 - RNA, 22 nt, Artificial Sequence
  Synthesized RNAi sequence
agagcuagcuuuuguuguauaa

SEQ ID NO: 1028 - RNA, 22 nt, Artificial Sequence
  Synthesized RNAi sequence
agauaaaaucauaucauugauu

SEQ ID NO: 1029 - RNA, 22 nt, Artificial Sequence
  Synthesized RNAi sequence
agaucagcauuccaagaauguu

SEQ ID NO: 1030 - RNA, 22 nt, Artificial Sequence
  Synthesized RNAi sequence
agaucccauuuauuagcuguau

SEQ ID NO: 1031 - RNA, 22 nt, Artificial Sequence
  Synthesized RNAi sequence
agaucugaaucgacaagcagcg

SEQ ID NO: 1032 - RNA, 22 nt, Artificial Sequence
  Synthesized RNAi sequence
agauuaggcauagcaacacccg

SEQ ID NO: 1033 - RNA, 22 nt, Artificial Sequence
  Synthesized RNAi sequence
agcaccaaaauguauaacucuc

SEQ ID NO: 1034 - RNA, 22 nt, Artificial Sequence
  Synthesized RNAi sequence
agcaguaccccuuaauuuaagg

SEQ ID NO: 1035 - RNA, 22 nt, Artificial Sequence
  Synthesized RNAi sequence
agcauuccaagaauguucuguu

SEQ ID NO: 1036 - RNA, 22 nt, Artificial Sequence
  Synthesized RNAi sequence
agcauucuuugcauuuuguaaa

SEQ ID NO: 1037 - RNA, 22 nt, Artificial Sequence
  Synthesized RNAi sequence
agccacggaaccuccaagagcu

SEQ ID NO: 1038 - RNA, 22 nt, Artificial Sequence
  Synthesized RNAi sequence
agcguacccguaggcaaccacu

SEQ ID NO: 1039 - RNA, 22 nt, Artificial Sequence
  Synthesized RNAi sequence
agcuagcuuuuguuguauaaac

SEQ ID NO: 1040 - RNA, 22 nt, Artificial Sequence
  Synthesized RNAi sequence
agcuguaccuggugcaacuccu

SEQ ID NO: 1041 - RNA, 22 nt, Artificial Sequence
  Synthesized RNAi sequence
agcuguauguacaguugcacaa

SEQ ID NO: 1042 - RNA, 22 nt, Artificial Sequence
  Synthesized RNAi sequence
agcuuauaaagaucagcauucc

SEQ ID NO: 1043 - RNA, 22 nt, Artificial Sequence
  Synthesized RNAi sequence
agcuuuuguuguauaaacccac

SEQ ID NO: 1044 - RNA, 22 nt, Artificial Sequence
  Synthesized RNAi sequence
aggaagacaacugaauuggauu

SEQ ID NO: 1045 - RNA, 22 nt, Artificial Sequence
  Synthesized RNAi sequence
aggcaaccacugucuuaaaaca

SEQ ID NO: 1046 - RNA, 22 nt, Artificial Sequence
  Synthesized RNAi sequence
aggcauagcaacacccgguugc

SEQ ID NO: 1047 - RNA, 22 nt, Artificial Sequence
  Synthesized RNAi sequence
aggcuguccaccaugcgaagug

SEQ ID NO: 1048 - RNA, 22 nt, Artificial Sequence
  Synthesized RNAi sequence
aggggaaauuuacucaugucaa

SEQ ID NO: 1049 - RNA, 22 nt, Artificial Sequence
  Synthesized RNAi sequence
aggguacagcuaauguuaaugu

SEQ ID NO: 1050 - RNA, 22 nt, Artificial Sequence
  Synthesized RNAi sequence
agguaauguugcacuaucacca

SEQ ID NO: 1051 - RNA, 22 nt, Artificial Sequence
  Synthesized RNAi sequence
aggucacacuuuucuaauagca

SEQ ID NO: 1052 - RNA, 22 nt, Artificial Sequence
  Synthesized RNAi sequence
aguaacaaaggcuguccaccau

SEQ ID NO: 1053 - RNA, 22 nt, Artificial Sequence
  Synthesized RNAi sequence
aguauauuuugcgacauucauc

SEQ ID NO: 1054 - RNA, 22 nt, Artificial Sequence
  Synthesized RNAi sequence
agucauuaagaucugaaucgac

SEQ ID NO: 1055 - RNA, 22 nt, Artificial Sequence
  Synthesized RNAi sequence
agucuaccuuuacuaagaagag

SEQ ID NO: 1056 - RNA, 22 nt, Artificial Sequence
  Synthesized RNAi sequence
agugucccaugagcuuauaaag

SEQ ID NO: 1057 - RNA, 22 nt, Artificial Sequence
  Synthesized RNAi sequence
aguugaaucugcaucagagaca

SEQ ID NO: 1058 - RNA, 22 nt, Artificial Sequence
  Synthesized RNAi sequence
aguugaguauauuuugcgacau

SEQ ID NO: 1059 - RNA, 22 nt, Artificial Sequence
  Synthesized RNAi sequence
aguugcacaaucaccaaucaaa

SEQ ID NO: 1060 - RNA, 22 nt, Artificial Sequence
  Synthesized RNAi sequence
aguuguuaacaagaacaucacu

SEQ ID NO: 1061 - RNA, 22 nt, Artificial Sequence
  Synthesized RNAi sequence
auaaaaucauaucauugauuug

SEQ ID NO: 1062 - RNA, 22 nt, Artificial Sequence
  Synthesized RNAi sequence
auaacagcaguaccccuuaauu

SEQ ID NO: 1063 - RNA, 22 nt, Artificial Sequence
  Synthesized RNAi sequence
auaaccaucuauuuguucgcgu

SEQ ID NO: 1064 - RNA, 22 nt, Artificial Sequence
  Synthesized RNAi sequence
auaacucucauauuauagggua

SEQ ID NO: 1065 - RNA, 22 nt, Artificial Sequence
  Synthesized RNAi sequence
auaagucuaccuuuacuaagaa

SEQ ID NO: 1066 - RNA, 22 nt, Artificial Sequence
  Synthesized RNAi sequence
auaaugagaucccauuuauuag

SEQ ID NO: 1067 - RNA, 22 nt, Artificial Sequence
  Synthesized RNAi sequence
auaauuuugaaggucacacuuu

SEQ ID NO: 1068 - RNA, 22 nt, Artificial Sequence
  Synthesized RNAi sequence
auagcauucuuugcauuuugua

SEQ ID NO: 1069 - RNA, 22 nt, Artificial Sequence
  Synthesized RNAi sequence
auagccacggaaccuccaagag

SEQ ID NO: 1070 - RNA, 22 nt, Artificial Sequence
  Synthesized RNAi sequence
auaggaagacaacugaauugga

SEQ ID NO: 1071 - RNA, 22 nt, Artificial Sequence
  Synthesized RNAi sequence
auaggguacagcuaauguuaau

SEQ ID NO: 1072 - RNA, 22 nt, Artificial Sequence
  Synthesized RNAi sequence
auaucacuaauaaugagauccc

SEQ ID NO: 1073 - RNA, 22 nt, Artificial Sequence
  Synthesized RNAi sequence
auaucauugauuugaccuucuu

SEQ ID NO: 1074 - RNA, 22 nt, Artificial Sequence
  Synthesized RNAi sequence
auauguaauuugcaugcaugac

SEQ ID NO: 1075 - RNA, 22 nt, Artificial Sequence
  Synthesized RNAi sequence
auauuauaggguacagcuaaug

SEQ ID NO: 1076 - RNA, 22 nt, Artificial Sequence
  Synthesized RNAi sequence
auauugacacaguugaguauau

SEQ ID NO: 1077 - RNA, 22 nt, Artificial Sequence
  Synthesized RNAi sequence
aucaaaguugaaucugcaucag

SEQ ID NO: 1078 - RNA, 22 nt, Artificial Sequence
  Synthesized RNAi sequence
aucaccaaucaaaguugaaucu

SEQ ID NO: 1079 - RNA, 22 nt, Artificial Sequence
  Synthesized RNAi sequence
aucaccauaauuuugaagguca

SEQ ID NO: 1080 - RNA, 22 nt, Artificial Sequence
  Synthesized RNAi sequence
aucacuaauaaugagaucccau

SEQ ID NO: 1081 - RNA, 22 nt, Artificial Sequence
  Synthesized RNAi sequence
aucacuagaaauaacaacucug

SEQ ID NO: 1082 - RNA, 22 nt, Artificial Sequence
  Synthesized RNAi sequence
aucagaaccagcaccaaaaugu

SEQ ID NO: 1083 - RNA, 22 nt, Artificial Sequence
  Synthesized RNAi sequence
aucagagacaaagucauuaaga

SEQ ID NO: 1084 - RNA, 22 nt, Artificial Sequence
  Synthesized RNAi sequence
aucagcauuccaagaauguucu

SEQ ID NO: 1085 - RNA, 22 nt, Artificial Sequence
  Synthesized RNAi sequence
aucauaucauugauuugaccuu

SEQ ID NO: 1086 - RNA, 22 nt, Artificial Sequence
  Synthesized RNAi sequence
aucauuaugccuuuagguaaug

SEQ ID NO: 1087 - RNA, 22 nt, Artificial Sequence
  Synthesized RNAi sequence
aucccauuuauuagcuguaugu

SEQ ID NO: 1088 - RNA, 22 nt, Artificial Sequence
  Synthesized RNAi sequence
aucgacaagcagcguacccgua

SEQ ID NO: 1089 - RNA, 22 nt, Artificial Sequence
  Synthesized RNAi sequence
aucuauuuguucgcgugguuug

SEQ ID NO: 1090 - RNA, 22 nt, Artificial Sequence
  Synthesized RNAi sequence
aucugaaucgacaagcagcgua

SEQ ID NO: 1091 - RNA, 22 nt, Artificial Sequence
  Synthesized RNAi sequence
aucugcaucagagacaaaguca

SEQ ID NO: 1092 - RNA, 22 nt, Artificial Sequence
  Synthesized RNAi sequence
aucuuuauagccacggaaccuc

SEQ ID NO: 1093 - RNA, 22 nt, Artificial Sequence
  Synthesized RNAi sequence
augacauaaccaucuauuuguu

SEQ ID NO: 1094 - RNA, 22 nt, Artificial Sequence
  Synthesized RNAi sequence
augacgcauucacauuaguaac

SEQ ID NO: 1095 - RNA, 22 nt, Artificial Sequence
  Synthesized RNAi sequence
augagaucccauuuauuagcug

SEQ ID NO: 1096 - RNA, 22 nt, Artificial Sequence
  Synthesized RNAi sequence
augagcuuauaaagaucagcau

SEQ ID NO: 1097 - RNA, 22 nt, Artificial Sequence
  Synthesized RNAi sequence
augcaugacauaaccaucuauu

SEQ ID NO: 1098 - RNA, 22 nt, Artificial Sequence
  Synthesized RNAi sequence
augccuuuagguaauguugcac

SEQ ID NO: 1099 - RNA, 22 nt, Artificial Sequence
  Synthesized RNAi sequence
augcgaagugucccaugagcuu

SEQ ID NO: 1100 - RNA, 22 nt, Artificial Sequence
  Synthesized RNAi sequence
auguaauuugcaugcaugacau

SEQ ID NO: 1101 - RNA, 22 nt, Artificial Sequence
  Synthesized RNAi sequence
auguacaguugcacaaucacca

SEQ ID NO: 1102 - RNA, 22 nt, Artificial Sequence
  Synthesized RNAi sequence
auguauaacucucauauuauag

SEQ ID NO: 1103 - RNA, 22 nt, Artificial Sequence
  Synthesized RNAi sequence
auguguuuaaauauugacacag

SEQ ID NO: 1104 - RNA, 22 nt, Artificial Sequence
  Synthesized RNAi sequence
auguucuguuaucuuuauagcc

SEQ ID NO: 1105 - RNA, 22 nt, Artificial Sequence
  Synthesized RNAi sequence
auguugcacuaucaccauaauu

SEQ ID NO: 1106 - RNA, 22 nt, Artificial Sequence
  Synthesized RNAi sequence
auuaagaucugaaucgacaagc

SEQ ID NO: 1107 - RNA, 22 nt, Artificial Sequence
  Synthesized RNAi sequence
auuagcuguauguacaguugca

SEQ ID NO: 1108 - RNA, 22 nt, Artificial Sequence
  Synthesized RNAi sequence
auuaggcauagcaacacccggu

SEQ ID NO: 1109 - RNA, 22 nt, Artificial Sequence
  Synthesized RNAi sequence
auuaguaacaaaggcuguccac

SEQ ID NO: 1110 - RNA, 22 nt, Artificial Sequence
  Synthesized RNAi sequence
auuauaagucuaccuuuacuaa

SEQ ID NO: 1111 - RNA, 22 nt, Artificial Sequence
  Synthesized RNAi sequence
auuauaggguacagcuaauguu

SEQ ID NO: 1112 - RNA, 22 nt, Artificial Sequence
  Synthesized RNAi sequence
auuaugccuuuagguaauguug

SEQ ID NO: 1113 - RNA, 22 nt, Artificial Sequence
  Synthesized RNAi sequence
auucacauuaguaacaaaggcu

SEQ ID NO: 1114 - RNA, 22 nt, Artificial Sequence
  Synthesized RNAi sequence
auucaucauuaugccuuuaggu

SEQ ID NO: 1115 - RNA, 22 nt, Artificial Sequence
  Synthesized RNAi sequence
auuccaagaauguucuguuauc

SEQ ID NO: 1116 - RNA, 22 nt, Artificial Sequence
  Synthesized RNAi sequence
auuccuccaaaauauguaauuu

SEQ ID NO: 1117 - RNA, 22 nt, Artificial Sequence
  Synthesized RNAi sequence
auugauuugaccuucuuuuaaa

SEQ ID NO: 1118 - RNA, 22 nt, Artificial Sequence
  Synthesized RNAi sequence
auuggauuuguauuccuccaaa

SEQ ID NO: 1119 - RNA, 22 nt, Artificial Sequence
  Synthesized RNAi sequence
auuuaaggggaaauuuacucau

SEQ ID NO: 1120 - RNA, 22 nt, Artificial Sequence
  Synthesized RNAi sequence
auuuacucaugucaaauaaaga

SEQ ID NO: 1121 - RNA, 22 nt, Artificial Sequence
  Synthesized RNAi sequence
auuuauuagcuguauguacagu

SEQ ID NO: 1122 - RNA, 22 nt, Artificial Sequence
  Synthesized RNAi sequence
auuugaccuucuuuuaaagaca

SEQ ID NO: 1123 - RNA, 22 nt, Artificial Sequence
  Synthesized RNAi sequence
auuugcaugcaugacauaacca

SEQ ID NO: 1124 - RNA, 22 nt, Artificial Sequence
  Synthesized RNAi sequence
auuuguauuccuccaaaauaug

SEQ ID NO: 1125 - RNA, 22 nt, Artificial Sequence
  Synthesized RNAi sequence
auuuguucgcgugguuugccaa

SEQ ID NO: 1126 - RNA, 22 nt, Artificial Sequence
  Synthesized RNAi sequence
auuuugaaggucacacuuuucu

SEQ ID NO: 1127 - RNA, 22 nt, Artificial Sequence
  Synthesized RNAi sequence
auuuugcgacauucaucauuau

SEQ ID NO: 1128 - RNA, 22 nt, Artificial Sequence
  Synthesized RNAi sequence
auuuuguaaagauuaggcauag

SEQ ID NO: 1129 - RNA, 22 nt, Artificial Sequence
  Synthesized RNAi sequence
uaaaacagcuguaccuggugca

SEQ ID NO: 1130 - RNA, 22 nt, Artificial Sequence
  Synthesized RNAi sequence
uaaagaauaggaagacaacuga

SEQ ID NO: 1131 - RNA, 22 nt, Artificial Sequence
  Synthesized RNAi sequence
uaaagacauaacagcaguaccc

SEQ ID NO: 1132 - RNA, 22 nt, Artificial Sequence
  Synthesized RNAi sequence
uaaagaucagcauuccaagaau

SEQ ID NO: 1133 - RNA, 22 nt, Artificial Sequence
  Synthesized RNAi sequence
uaaagauuaggcauagcaacac

SEQ ID NO: 1134 - RNA, 22 nt, Artificial Sequence
  Synthesized RNAi sequence
uaaauauugacacaguugagua

SEQ ID NO: 1135 - RNA, 22 nt, Artificial Sequence
  Synthesized RNAi sequence
uaacaaaggcuguccaccaugc

SEQ ID NO: 1136 - RNA, 22 nt, Artificial Sequence
  Synthesized RNAi sequence
uaacaacucuguuguuuucucu

SEQ ID NO: 1137 - RNA, 22 nt, Artificial Sequence
  Synthesized RNAi sequence
uaacaagaacaucacuagaaau

SEQ ID NO: 1138 - RNA, 22 nt, Artificial Sequence
  Synthesized RNAi sequence
uaacagcaguaccccuuaauuu

SEQ ID NO: 1139 - RNA, 22 nt, Artificial Sequence
  Synthesized RNAi sequence
uaaccaucuauuuguucgcgug

SEQ ID NO: 1140 - RNA, 22 nt, Artificial Sequence
  Synthesized RNAi sequence
uaacucucauauuauaggguac

SEQ ID NO: 1141 - RNA, 22 nt, Artificial Sequence
  Synthesized RNAi sequence
uaagaagagauaaaaucauauc

SEQ ID NO: 1142 - RNA, 22 nt, Artificial Sequence
  Synthesized RNAi sequence
uaagaucugaaucgacaagcag

SEQ ID NO: 1143 - RNA, 22 nt, Artificial Sequence
  Synthesized RNAi sequence
uaaggggaaauuuacucauguc

SEQ ID NO: 1144 - RNA, 22 nt, Artificial Sequence
  Synthesized RNAi sequence
uaagucuaccuuuacuaagaag

SEQ ID NO: 1145 - RNA, 22 nt, Artificial Sequence
  Synthesized RNAi sequence
uaauaaugagaucccauuuauu

SEQ ID NO: 1146 - RNA, 22 nt, Artificial Sequence
  Synthesized RNAi sequence
uaaugagaucccauuuauuagc

SEQ ID NO: 1147 - RNA, 22 nt, Artificial Sequence
  Synthesized RNAi sequence
uaauguguuuaaauauugacac

SEQ ID NO: 1148 - RNA, 22 nt, Artificial Sequence
  Synthesized RNAi sequence
uaauguugcacuaucaccauaa

SEQ ID NO: 1149 - RNA, 22 nt, Artificial Sequence
  Synthesized RNAi sequence
uaauuuaaggggaaauuuacuc

SEQ ID NO: 1150 - RNA, 22 nt, Artificial Sequence
  Synthesized RNAi sequence
uaauuugcaugcaugacauaac

SEQ ID NO: 1151 - RNA, 22 nt, Artificial Sequence
  Synthesized RNAi sequence
uacagcuaauguuaauguguuu

SEQ ID NO: 1152 - RNA, 22 nt, Artificial Sequence
  Synthesized RNAi sequence
uacaguugcacaaucaccaauc

SEQ ID NO: 1153 - RNA, 22 nt, Artificial Sequence
  Synthesized RNAi sequence
uacauaucacuaauaaugagau

SEQ ID NO: 1154 - RNA, 22 nt, Artificial Sequence
  Synthesized RNAi sequence
uaccccuuaauuuaaggggaaa

SEQ ID NO: 1155 - RNA, 22 nt, Artificial Sequence
  Synthesized RNAi sequence
uacccguaggcaaccacugucu

SEQ ID NO: 1156 - RNA, 22 nt, Artificial Sequence
  Synthesized RNAi sequence
uaccuggugcaacuccuuuauc

SEQ ID NO: 1157 - RNA, 22 nt, Artificial Sequence
  Synthesized RNAi sequence
uaccuuuacuaagaagagauaa

SEQ ID NO: 1158 - RNA, 22 nt, Artificial Sequence
  Synthesized RNAi sequence
uacuaagaagagauaaaaucau

SEQ ID NO: 1159 - RNA, 22 nt, Artificial Sequence
  Synthesized RNAi sequence
uacucaugucaaauaaagaaua

SEQ ID NO: 1160 - RNA, 22 nt, Artificial Sequence
  Synthesized RNAi sequence
uagaaauaacaacucuguuguu

SEQ ID NO: 1161 - RNA, 22 nt, Artificial Sequence
  Synthesized RNAi sequence
uagcauucuuugcauuuuguaa

SEQ ID NO: 1162 - RNA, 22 nt, Artificial Sequence
  Synthesized RNAi sequence
uagccacggaaccuccaagagc

SEQ ID NO: 1163 - RNA, 22 nt, Artificial Sequence
  Synthesized RNAi sequence
uagcuguauguacaguugcaca

SEQ ID NO: 1164 - RNA, 22 nt, Artificial Sequence
  Synthesized RNAi sequence
uagcuuuuguuguauaaaccca

SEQ ID NO: 1165 - RNA, 22 nt, Artificial Sequence
  Synthesized RNAi sequence
uaggaagacaacugaauuggau

SEQ ID NO: 1166 - RNA, 22 nt, Artificial Sequence
  Synthesized RNAi sequence
uaggcaaccacugucuuaaaac

SEQ ID NO: 1167 - RNA, 22 nt, Artificial Sequence
  Synthesized RNAi sequence
uaggcauagcaacacccgguug

SEQ ID NO: 1168 - RNA, 22 nt, Artificial Sequence
  Synthesized RNAi sequence
uaggguacagcuaauguuaaug

SEQ ID NO: 1169 - RNA, 22 nt, Artificial Sequence
  Synthesized RNAi sequence
uagguaauguugcacuaucacc

SEQ ID NO: 1170 - RNA, 22 nt, Artificial Sequence
  Synthesized RNAi sequence
uaguaacaaaggcuguccacca

SEQ ID NO: 1171 - RNA, 22 nt, Artificial Sequence
  Synthesized RNAi sequence
uauaaagaucagcauuccaaga

SEQ ID NO: 1172 - RNA, 22 nt, Artificial Sequence
  Synthesized RNAi sequence
uauaacucucauauuauagggu

SEQ ID NO: 1173 - RNA, 22 nt, Artificial Sequence
  Synthesized RNAi sequence
uauaagucuaccuuuacuaaga

SEQ ID NO: 1174 - RNA, 22 nt, Artificial Sequence
  Synthesized RNAi sequence
uauagccacggaaccuccaaga

SEQ ID NO: 1175 - RNA, 22 nt, Artificial Sequence
  Synthesized RNAi sequence
uauaggguacagcuaauguuaa

SEQ ID NO: 1176 - RNA, 22 nt, Artificial Sequence
  Synthesized RNAi sequence
uauauuuugcgacauucaucau

SEQ ID NO: 1177 - RNA, 22 nt, Artificial Sequence
  Synthesized RNAi sequence
uaucaccauaauuuugaagguc

SEQ ID NO: 1178 - RNA, 22 nt, Artificial Sequence
  Synthesized RNAi sequence
uaucacuaauaaugagauccca

SEQ ID NO: 1179 - RNA, 22 nt, Artificial Sequence
  Synthesized RNAi sequence
uaucagaaccagcaccaaaaug

SEQ ID NO: 1180 - RNA, 22 nt, Artificial Sequence
  Synthesized RNAi sequence
uaucauugauuugaccuucuuu

SEQ ID NO: 1181 - RNA, 22 nt, Artificial Sequence
  Synthesized RNAi sequence
uaucuuuauagccacggaaccu

SEQ ID NO: 1182 - RNA, 22 nt, Artificial Sequence
  Synthesized RNAi sequence
uaugccuuuagguaauguugca

SEQ ID NO: 1183 - RNA, 22 nt, Artificial Sequence
  Synthesized RNAi sequence
uauguaauuugcaugcaugaca

SEQ ID NO: 1184 - RNA, 22 nt, Artificial Sequence
  Synthesized RNAi sequence
uauguacaguugcacaaucacc

SEQ ID NO: 1185 - RNA, 22 nt, Artificial Sequence
  Synthesized RNAi sequence
uauuagcuguauguacaguugc

SEQ ID NO: 1186 - RNA, 22 nt, Artificial Sequence
  Synthesized RNAi sequence
uauuauaggguacagcuaaugu

SEQ ID NO: 1187 - RNA, 22 nt, Artificial Sequence
  Synthesized RNAi sequence
uauuccuccaaaauauguaauu

SEQ ID NO: 1188 - RNA, 22 nt, Artificial Sequence
  Synthesized RNAi sequence
uauugacacaguugaguauauu

SEQ ID NO: 1189 - RNA, 22 nt, Artificial Sequence
  Synthesized RNAi sequence
uauuuguucgcgugguuugcca

SEQ ID NO: 1190 - RNA, 22 nt, Artificial Sequence
  Synthesized RNAi sequence
uauuuugcgacauucaucauua

SEQ ID NO: 1191 - RNA, 22 nt, Artificial Sequence
  Synthesized RNAi sequence
ucaaaguugaaucugcaucaga

SEQ ID NO: 1192 - RNA, 22 nt, Artificial Sequence
  Synthesized RNAi sequence
ucacacuuuucuaauagcauuc

SEQ ID NO: 1193 - RNA, 22 nt, Artificial Sequence
  Synthesized RNAi sequence
ucacauuaguaacaaaggcugu

SEQ ID NO: 1194 - RNA, 22 nt, Artificial Sequence
  Synthesized RNAi sequence
ucaccaaucaaaguugaaucug

SEQ ID NO: 1195 - RNA, 22 nt, Artificial Sequence
  Synthesized RNAi sequence
ucaccauaauuuugaaggucac

SEQ ID NO: 1196 - RNA, 22 nt, Artificial Sequence
  Synthesized RNAi sequence
ucacuaauaaugagaucccauu

SEQ ID NO: 1197 - RNA, 22 nt, Artificial Sequence
  Synthesized RNAi sequence
ucacuagaaauaacaacucugu

SEQ ID NO: 1198 - RNA, 22 nt, Artificial Sequence
  Synthesized RNAi sequence
ucagaaccagcaccaaaaugua

SEQ ID NO: 1199 - RNA, 22 nt, Artificial Sequence
  Synthesized RNAi sequence
ucagagacaaagucauuaagau

SEQ ID NO: 1200 - RNA, 22 nt, Artificial Sequence
  Synthesized RNAi sequence
ucagcauuccaagaauguucug

SEQ ID NO: 1201 - RNA, 22 nt, Artificial Sequence
  Synthesized RNAi sequence
ucauaucauugauuugaccuuc

SEQ ID NO: 1202 - RNA, 22 nt, Artificial Sequence
  Synthesized RNAi sequence
ucauauuauaggguacagcuaa

SEQ ID NO: 1203 - RNA, 22 nt, Artificial Sequence
  Synthesized RNAi sequence
ucaucauuaugccuuuagguaa

SEQ ID NO: 1204 - RNA, 22 nt, Artificial Sequence
  Synthesized RNAi sequence
ucaugucaaauaaagaauagga

SEQ ID NO: 1205 - RNA, 22 nt, Artificial Sequence
  Synthesized RNAi sequence
ucauuaagaucugaaucgacaa

SEQ ID NO: 1206 - RNA, 22 nt, Artificial Sequence
  Synthesized RNAi sequence
ucauuaugccuuuagguaaugu

SEQ ID NO: 1207 - RNA, 22 nt, Artificial Sequence
  Synthesized RNAi sequence
ucauugauuugaccuucuuuua

SEQ ID NO: 1208 - RNA, 22 nt, Artificial Sequence
  Synthesized RNAi sequence
uccaaaauauguaauuugcaug

SEQ ID NO: 1209 - RNA, 22 nt, Artificial Sequence
  Synthesized RNAi sequence
uccaagaauguucuguuaucuu

SEQ ID NO: 1210 - RNA, 22 nt, Artificial Sequence
  Synthesized RNAi sequence
uccaagagcuagcuuuuguugu

SEQ ID NO: 1211 - RNA, 22 nt, Artificial Sequence
  Synthesized RNAi sequence
uccaccaugcgaagugucccau

SEQ ID NO: 1212 - RNA, 22 nt, Artificial Sequence
  Synthesized RNAi sequence
ucccaugagcuuauaaagauca

SEQ ID NO: 1213 - RNA, 22 nt, Artificial Sequence
  Synthesized RNAi sequence
ucccauuuauuagcuguaugua

SEQ ID NO: 1214 - RNA, 22 nt, Artificial Sequence
  Synthesized RNAi sequence
uccuccaaaauauguaauuugc

SEQ ID NO: 1215 - RNA, 22 nt, Artificial Sequence
  Synthesized RNAi sequence
uccuuuaucagaaccagcacca

SEQ ID NO: 1216 - RNA, 22 nt, Artificial Sequence
  Synthesized RNAi sequence
ucgacaagcagcguacccguag

SEQ ID NO: 1217 - RNA, 22 nt, Artificial Sequence
  Synthesized RNAi sequence
ucgcgugguuugccaagauaau

SEQ ID NO: 1218 - RNA, 22 nt, Artificial Sequence
  Synthesized RNAi sequence
ucguacauaucacuaauaauga

SEQ ID NO: 1219 - RNA, 22 nt, Artificial Sequence
  Synthesized RNAi sequence
ucguuuaguuguuaacaagaac

SEQ ID NO: 1220 - RNA, 22 nt, Artificial Sequence
  Synthesized RNAi sequence
ucuaauagcauucuuugcauuu

SEQ ID NO: 1221 - RNA, 22 nt, Artificial Sequence
  Synthesized RNAi sequence
ucuaauuauaagucuaccuuua

SEQ ID NO: 1222 - RNA, 22 nt, Artificial Sequence
  Synthesized RNAi sequence
ucuaccuuuacuaagaagagau

SEQ ID NO: 1223 - RNA, 22 nt, Artificial Sequence
  Synthesized RNAi sequence
ucuauuuguucgcgugguuugc

SEQ ID NO: 1224 - RNA, 22 nt, Artificial Sequence
  Synthesized RNAi sequence
ucucauauuauaggguacagcu

SEQ ID NO: 1225 - RNA, 22 nt, Artificial Sequence
  Synthesized RNAi sequence
ucucuaauuauaagucuaccuu

SEQ ID NO: 1226 - RNA, 22 nt, Artificial Sequence
  Synthesized RNAi sequence
ucugaaucgacaagcagcguac

SEQ ID NO: 1227 - RNA, 22 nt, Artificial Sequence
  Synthesized RNAi sequence
ucugcaucagagacaaagucau

SEQ ID NO: 1228 - RNA, 22 nt, Artificial Sequence
  Synthesized RNAi sequence
ucuguuaucuuuauagccacgg

SEQ ID NO: 1229 - RNA, 22 nt, Artificial Sequence
  Synthesized RNAi sequence
ucuguuguuuucucuaauuaua

SEQ ID NO: 1230 - RNA, 22 nt, Artificial Sequence
  Synthesized RNAi sequence
ucuuaaaacagcuguaccuggu

SEQ ID NO: 1231 - RNA, 22 nt, Artificial Sequence
  Synthesized RNAi sequence
ucuuugcauuuuguaaagauua

SEQ ID NO: 1232 - RNA, 22 nt, Artificial Sequence
  Synthesized RNAi sequence
ugaaucgacaagcagcguaccc

SEQ ID NO: 1233 - RNA, 22 nt, Artificial Sequence
  Synthesized RNAi sequence
ugaaucugcaucagagacaaag

SEQ ID NO: 1234 - RNA, 22 nt, Artificial Sequence
  Synthesized RNAi sequence
ugaauuggauuuguauuccucc

SEQ ID NO: 1235 - RNA, 22 nt, Artificial Sequence
  Synthesized RNAi sequence
ugacauaaccaucuauuuguuc

SEQ ID NO: 1236 - RNA, 22 nt, Artificial Sequence
  Synthesized RNAi sequence
ugaccuucuuuuaaagacauaa

SEQ ID NO: 1237 - RNA, 22 nt, Artificial Sequence
  Synthesized RNAi sequence
ugacgcauucacauuaguaaca

SEQ ID NO: 1238 - RNA, 22 nt, Artificial Sequence
  Synthesized RNAi sequence
ugagaucccauuuauuagcugu

SEQ ID NO: 1239 - RNA, 22 nt, Artificial Sequence
  Synthesized RNAi sequence
ugagcuuauaaagaucagcauu

SEQ ID NO: 1240 - RNA, 22 nt, Artificial Sequence
  Synthesized RNAi sequence
ugaguauauuuugcgacauuca

SEQ ID NO: 1241 - RNA, 22 nt, Artificial Sequence
  Synthesized RNAi sequence
ugauuugaccuucuuuuaaaga

SEQ ID NO: 1242 - RNA, 22 nt, Artificial Sequence
  Synthesized RNAi sequence
ugcaacuccuuuaucagaacca

SEQ ID NO: 1243 - RNA, 22 nt, Artificial Sequence
  Synthesized RNAi sequence
ugcacaaucaccaaucaaaguu

SEQ ID NO: 1244 - RNA, 22 nt, Artificial Sequence
  Synthesized RNAi sequence
ugcacuaucaccauaauuuuga

SEQ ID NO: 1245 - RNA, 22 nt, Artificial Sequence
  Synthesized RNAi sequence
ugcaucagagacaaagucauua

SEQ ID NO: 1246 - RNA, 22 nt, Artificial Sequence
  Synthesized RNAi sequence
ugcaugacauaaccaucuauuu

SEQ ID NO: 1247 - RNA, 22 nt, Artificial Sequence
  Synthesized RNAi sequence
ugcaugcaugacauaaccaucu

SEQ ID NO: 1248 - RNA, 22 nt, Artificial Sequence
  Synthesized RNAi sequence
ugcauuuuguaaagauuaggca

SEQ ID NO: 1249 - RNA, 22 nt, Artificial Sequence
  Synthesized RNAi sequence
ugccuuuagguaauguugcacu

SEQ ID NO: 1250 - RNA, 22 nt, Artificial Sequence
  Synthesized RNAi sequence
ugcgaagugucccaugagcuua

SEQ ID NO: 1251 - RNA, 22 nt, Artificial Sequence
  Synthesized RNAi sequence
ugcgacauucaucauuaugccu

SEQ ID NO: 1252 - RNA, 22 nt, Artificial Sequence
  Synthesized RNAi sequence
uggauuuguauuccuccaaaau

SEQ ID NO: 1253 - RNA, 22 nt, Artificial Sequence
  Synthesized RNAi sequence
uggugcaacuccuuuaucagaa

SEQ ID NO: 1254 - RNA, 22 nt, Artificial Sequence
  Synthesized RNAi sequence
uguaaagauuaggcauagcaac

SEQ ID NO: 1255 - RNA, 22 nt, Artificial Sequence
  Synthesized RNAi sequence
uguaauuugcaugcaugacaua

SEQ ID NO: 1256 - RNA, 22 nt, Artificial Sequence
  Synthesized RNAi sequence
uguacaguugcacaaucaccaa

SEQ ID NO: 1257 - RNA, 22 nt, Artificial Sequence
  Synthesized RNAi sequence
uguaccuggugcaacuccuuua

SEQ ID NO: 1258 - RNA, 22 nt, Artificial Sequence
  Synthesized RNAi sequence
uguauaacucucauauuauagg

SEQ ID NO: 1259 - RNA, 22 nt, Artificial Sequence
  Synthesized RNAi sequence
uguauguacaguugcacaauca

SEQ ID NO: 1260 - RNA, 22 nt, Artificial Sequence
  Synthesized RNAi sequence
uguauuccuccaaaauauguaa

SEQ ID NO: 1261 - RNA, 22 nt, Artificial Sequence
  Synthesized RNAi sequence
uguccaccaugcgaaguguccc

SEQ ID NO: 1262 - RNA, 22 nt, Artificial Sequence
  Synthesized RNAi sequence
ugucccaugagcuuauaaagau

SEQ ID NO: 1263 - RNA, 22 nt, Artificial Sequence
  Synthesized RNAi sequence
ugucuuaaaacagcuguaccug

SEQ ID NO: 1264 - RNA, 22 nt, Artificial Sequence
  Synthesized RNAi sequence
uguguuuaaauauugacacagu

SEQ ID NO: 1265 - RNA, 22 nt, Artificial Sequence
  Synthesized RNAi sequence
uguuaacaagaacaucacuaga

SEQ ID NO: 1266 - RNA, 22 nt, Artificial Sequence
  Synthesized RNAi sequence
uguuaauguguuuaaauauuga

SEQ ID NO: 1267 - RNA, 22 nt, Artificial Sequence
  Synthesized RNAi sequence
uguuaucuuuauagccacggaa

SEQ ID NO: 1268 - RNA, 22 nt, Artificial Sequence
  Synthesized RNAi sequence
uguucgcgugguuugccaagau

SEQ ID NO: 1269 - RNA, 22 nt, Artificial Sequence
  Synthesized RNAi sequence
uguucuguuaucuuuauagcca

SEQ ID NO: 1270 - RNA, 22 nt, Artificial Sequence
  Synthesized RNAi sequence
uguugcacuaucaccauaauuu

SEQ ID NO: 1271 - RNA, 22 nt, Artificial Sequence
  Synthesized RNAi sequence
uguuguuuucucuaauuauaag

SEQ ID NO: 1272 - RNA, 22 nt, Artificial Sequence
  Synthesized RNAi sequence
uguuuaaauauugacacaguug

SEQ ID NO: 1273 - RNA, 22 nt, Artificial Sequence
  Synthesized RNAi sequence
uuaaaacagcuguaccuggugc

SEQ ID NO: 1274 - RNA, 22 nt, Artificial Sequence
  Synthesized RNAi sequence
uuaaagacauaacagcaguacc

SEQ ID NO: 1275 - RNA, 22 nt, Artificial Sequence
  Synthesized RNAi sequence
uuaaauauugacacaguugagu

SEQ ID NO: 1276 - RNA, 22 nt, Artificial Sequence
  Synthesized RNAi sequence
uuaacaagaacaucacuagaaa

SEQ ID NO: 1277 - RNA, 22 nt, Artificial Sequence
  Synthesized RNAi sequence
uuaagaucugaaucgacaagca

SEQ ID NO: 1278 - RNA, 22 nt, Artificial Sequence
  Synthesized RNAi sequence
uuaaggggaaauuuacucaugu

SEQ ID NO: 1279 - RNA, 22 nt, Artificial Sequence
  Synthesized RNAi sequence
uuaauuuaaggggaaauuuacu

SEQ ID NO: 1280 - RNA, 22 nt, Artificial Sequence
  Synthesized RNAi sequence
uuacuaagaagagauaaaauca

SEQ ID NO: 1281 - RNA, 22 nt, Artificial Sequence
  Synthesized RNAi sequence
uuacucaugucaaauaaagaau

SEQ ID NO: 1282 - RNA, 22 nt, Artificial Sequence
  Synthesized RNAi sequence
uuagcuguauguacaguugcac

SEQ ID NO: 1283 - RNA, 22 nt, Artificial Sequence
  Synthesized RNAi sequence
uuaggcauagcaacacccgguu

SEQ ID NO: 1284 - RNA, 22 nt, Artificial Sequence
  Synthesized RNAi sequence
uuagguaauguugcacuaucac

SEQ ID NO: 1285 - RNA, 22 nt, Artificial Sequence
  Synthesized RNAi sequence
uuaguaacaaaggcuguccacc

SEQ ID NO: 1286 - RNA, 22 nt, Artificial Sequence
  Synthesized RNAi sequence
uuaguuguuaacaagaacauca

SEQ ID NO: 1287 - RNA, 22 nt, Artificial Sequence
  Synthesized RNAi sequence
uuauaaagaucagcauuccaag

SEQ ID NO: 1288 - RNA, 22 nt, Artificial Sequence
  Synthesized RNAi sequence
uuauaagucuaccuuuacuaag

SEQ ID NO: 1289 - RNA, 22 nt, Artificial Sequence
  Synthesized RNAi sequence
uuauagccacggaaccuccaag

SEQ ID NO: 1290 - RNA, 22 nt, Artificial Sequence
  Synthesized RNAi sequence
uuauaggguacagcuaauguua

SEQ ID NO: 1291 - RNA, 22 nt, Artificial Sequence
  Synthesized RNAi sequence
uuaucagaaccagcaccaaaau

SEQ ID NO: 1292 - RNA, 22 nt, Artificial Sequence
  Synthesized RNAi sequence
uuaucuuuauagccacggaacc

SEQ ID NO: 1293 - RNA, 22 nt, Artificial Sequence
  Synthesized RNAi sequence
uuaugccuuuagguaauguugc

SEQ ID NO: 1294 - RNA, 22 nt, Artificial Sequence
  Synthesized RNAi sequence
uuauuagcuguauguacaguug

SEQ ID NO: 1295 - RNA, 22 nt, Artificial Sequence
  Synthesized RNAi sequence
uucacauuaguaacaaaggcug

SEQ ID NO: 1296 - RNA, 22 nt, Artificial Sequence
  Synthesized RNAi sequence
uucaucauuaugccuuuaggua

SEQ ID NO: 1297 - RNA, 22 nt, Artificial Sequence
  Synthesized RNAi sequence
uuccuccaaaauauguaauuug

SEQ ID NO: 1298 - RNA, 22 nt, Artificial Sequence
  Synthesized RNAi sequence
uucgcgugguuugccaagauaa

SEQ ID NO: 1299 - RNA, 22 nt, Artificial Sequence
  Synthesized RNAi sequence
uucuaauagcauucuuugcauu

SEQ ID NO: 1300 - RNA, 22 nt, Artificial Sequence
  Synthesized RNAi sequence
uucucuaauuauaagucuaccu

SEQ ID NO: 1301 - RNA, 22 nt, Artificial Sequence
  Synthesized RNAi sequence
uucuguuaucuuuauagccacg

SEQ ID NO: 1302 - RNA, 22 nt, Artificial Sequence
  Synthesized RNAi sequence
uucuuugcauuuuguaaagauu

SEQ ID NO: 1303 - RNA, 22 nt, Artificial Sequence
  Synthesized RNAi sequence
uucuuuuaaagacauaacagca

SEQ ID NO: 1304 - RNA, 22 nt, Artificial Sequence
  Synthesized RNAi sequence
uugaaggucacacuuuucuaau

SEQ ID NO: 1305 - RNA, 22 nt, Artificial Sequence
  Synthesized RNAi sequence
uugaaucugcaucagagacaaa

SEQ ID NO: 1306 - RNA, 22 nt, Artificial Sequence
  Synthesized RNAi sequence
uugaccuucuuuuaaagacaua

SEQ ID NO: 1307 - RNA, 22 nt, Artificial Sequence
  Synthesized RNAi sequence
uugaguauauuuugcgacauuc

SEQ ID NO: 1308 - RNA, 22 nt, Artificial Sequence
  Synthesized RNAi sequence
uugauuugaccuucuuuuaaag

SEQ ID NO: 1309 - RNA, 22 nt, Artificial Sequence
  Synthesized RNAi sequence
uugcacaaucaccaaucaaagu

SEQ ID NO: 1310 - RNA, 22 nt, Artificial Sequence
  Synthesized RNAi sequence
uugcaugcaugacauaaccauc

SEQ ID NO: 1311 - RNA, 22 nt, Artificial Sequence
  Synthesized RNAi sequence
uugcauuuuguaaagauuaggc

SEQ ID NO: 1312 - RNA, 22 nt, Artificial Sequence
  Synthesized RNAi sequence
uugcgacauucaucauuaugcc

SEQ ID NO: 1313 - RNA, 22 nt, Artificial Sequence
  Synthesized RNAi sequence
uuggauuuguauuccuccaaaa

SEQ ID NO: 1314 - RNA, 22 nt, Artificial Sequence
  Synthesized RNAi sequence
uuguaaagauuaggcauagcaa

SEQ ID NO: 1315 - RNA, 22 nt, Artificial Sequence
  Synthesized RNAi sequence
uuguauuccuccaaaauaugua

SEQ ID NO: 1316 - RNA, 22 nt, Artificial Sequence
  Synthesized RNAi sequence
uuguuaacaagaacaucacuag

SEQ ID NO: 1317 - RNA, 22 nt, Artificial Sequence
  Synthesized RNAi sequence
uuguucgcgugguuugccaaga

SEQ ID NO: 1318 - RNA, 22 nt, Artificial Sequence
  Synthesized RNAi sequence
uuuaaagacauaacagcaguac

SEQ ID NO: 1319 - RNA, 22 nt, Artificial Sequence
  Synthesized RNAi sequence
uuuaaauauugacacaguugag

SEQ ID NO: 1320 - RNA, 22 nt, Artificial Sequence
  Synthesized RNAi sequence
uuuaaggggaaauuuacucaug

SEQ ID NO: 1321 - RNA, 22 nt, Artificial Sequence
  Synthesized RNAi sequence
uuuacuaagaagagauaaaauc

SEQ ID NO: 1322 - RNA, 22 nt, Artificial Sequence
  Synthesized RNAi sequence
uuuacucaugucaaauaaagaa

SEQ ID NO: 1323 - RNA, 22 nt, Artificial Sequence
  Synthesized RNAi sequence
uuuagguaauguugcacuauca

SEQ ID NO: 1324 - RNA, 22 nt, Artificial Sequence
  Synthesized RNAi sequence
uuuaguuguuaacaagaacauc

SEQ ID NO: 1325 - RNA, 22 nt, Artificial Sequence
  Synthesized RNAi sequence
uuuauagccacggaaccuccaa

SEQ ID NO: 1326 - RNA, 22 nt, Artificial Sequence
  Synthesized RNAi sequence
uuuaucagaaccagcaccaaaa

SEQ ID NO: 1327 - RNA, 22 nt, Artificial Sequence
  Synthesized RNAi sequence
uuuauuagcuguauguacaguu

SEQ ID NO: 1328 - RNA, 22 nt, Artificial Sequence
  Synthesized RNAi sequence
uuucuaauagcauucuuugcau

SEQ ID NO: 1329 - RNA, 22 nt, Artificial Sequence
  Synthesized RNAi sequence
uuucucuaauuauaagucuacc

SEQ ID NO: 1330 - RNA, 22 nt, Artificial Sequence
  Synthesized RNAi sequence
uuugaaggucacacuuuucuaa

SEQ ID NO: 1331 - RNA, 22 nt, Artificial Sequence
  Synthesized RNAi sequence
uuugaccuucuuuuaaagacau

SEQ ID NO: 1332 - RNA, 22 nt, Artificial Sequence
  Synthesized RNAi sequence
uuugcaugcaugacauaaccau

SEQ ID NO: 1333 - RNA, 22 nt, Artificial Sequence
  Synthesized RNAi sequence
uuugcauuuuguaaagauuagg

SEQ ID NO: 1334 - RNA, 22 nt, Artificial Sequence
  Synthesized RNAi sequence
uuugcgacauucaucauuaugc

SEQ ID NO: 1335 - RNA, 22 nt, Artificial Sequence
  Synthesized RNAi sequence
uuuguaaagauuaggcauagca

SEQ ID NO: 1336 - RNA, 22 nt, Artificial Sequence
  Synthesized RNAi sequence
uuuguauuccuccaaaauaugu

SEQ ID NO: 1337 - RNA, 22 nt, Artificial Sequence
  Synthesized RNAi sequence
uuuguucgcgugguuugccaag

SEQ ID NO: 1338 - RNA, 22 nt, Artificial Sequence
  Synthesized RNAi sequence
uuuuaaagacauaacagcagua

SEQ ID NO: 1339 - RNA, 22 nt, Artificial Sequence
  Synthesized RNAi sequence
uuuucuaauagcauucuuugca

SEQ ID NO: 1340 - RNA, 22 nt, Artificial Sequence
  Synthesized RNAi sequence
uuuucucuaauuauaagucuac

SEQ ID NO: 1341 - RNA, 22 nt, Artificial Sequence
  Synthesized RNAi sequence
uuuugaaggucacacuuuucua

SEQ ID NO: 1342 - RNA, 22 nt, Artificial Sequence
  Synthesized RNAi sequence
uuuugcgacauucaucauuaug

SEQ ID NO: 1343 - RNA, 22 nt, Artificial Sequence
  Synthesized RNAi sequence
uuuuguaaagauuaggcauagc

SEQ ID NO: 1344 - RNA, 22 nt, Artificial Sequence
  Synthesized RNAi sequence
aaacaauggaauuagcaggaua

SEQ ID NO: 1345 - RNA, 22 nt, Artificial Sequence
  Synthesized RNAi sequence
aaacauguuaggguaaccauua

SEQ ID NO: 1346 - RNA, 22 nt, Artificial Sequence
  Synthesized RNAi sequence
aaacccacaagcuaaagccagc

SEQ ID NO: 1347 - RNA, 22 nt, Artificial Sequence
  Synthesized RNAi sequence
aaacccaucauagagaugaguc

SEQ ID NO: 1348 - RNA, 22 nt, Artificial Sequence
  Synthesized RNAi sequence
aaaccccauuguugaacaucaa

SEQ ID NO: 1349 - RNA, 22 nt, Artificial Sequence
  Synthesized RNAi sequence
aaaccuucaguuuugaauuuag

SEQ ID NO: 1350 - RNA, 22 nt, Artificial Sequence
  Synthesized RNAi sequence
aaacggauuauagacguaauca

SEQ ID NO: 1351 - RNA, 22 nt, Artificial Sequence
  Synthesized RNAi sequence
aaacucugaagucuuguaaaag

SEQ ID NO: 1352 - RNA, 22 nt, Artificial Sequence
  Synthesized RNAi sequence
aaagcacucguggacagcuaga

SEQ ID NO: 1353 - RNA, 22 nt, Artificial Sequence
  Synthesized RNAi sequence
aaagcacuuuuaucaaaagcug

SEQ ID NO: 1354 - RNA, 22 nt, Artificial Sequence
  Synthesized RNAi sequence
aaagcauguggcacgucuauca

SEQ ID NO: 1355 - RNA, 22 nt, Artificial Sequence
  Synthesized RNAi sequence
aaagccaugugcccauaagaca

SEQ ID NO: 1356 - RNA, 22 nt, Artificial Sequence
  Synthesized RNAi sequence
aaagcugguguguggaaugcau

SEQ ID NO: 1357 - RNA, 22 nt, Artificial Sequence
  Synthesized RNAi sequence
aaaguguuccagagguuauaag

SEQ ID NO: 1358 - RNA, 22 nt, Artificial Sequence
  Synthesized RNAi sequence
aaauacuucauagaugucaacu

SEQ ID NO: 1359 - RNA, 22 nt, Artificial Sequence
  Synthesized RNAi sequence
aaauaggcauacaccaucugug

SEQ ID NO: 1360 - RNA, 22 nt, Artificial Sequence
  Synthesized RNAi sequence
aaauccaauagaaugaugccaa

SEQ ID NO: 1361 - RNA, 22 nt, Artificial Sequence
  Synthesized RNAi sequence
aaaucuacaaacaauggaauua

SEQ ID NO: 1362 - RNA, 22 nt, Artificial Sequence
  Synthesized RNAi sequence
aaauuaacaaaagcacuuuuau

SEQ ID NO: 1363 - RNA, 22 nt, Artificial Sequence
  Synthesized RNAi sequence
aaauugaucuccaggcgguggu

SEQ ID NO: 1364 - RNA, 22 nt, Artificial Sequence
  Synthesized RNAi sequence
aaauugcaacguguuauacacg

SEQ ID NO: 1365 - RNA, 22 nt, Artificial Sequence
  Synthesized RNAi sequence
aaauugguaccaacagcuucuc

SEQ ID NO: 1366 - RNA, 22 nt, Artificial Sequence
  Synthesized RNAi sequence
aaauuguuuguaaacccacaag

SEQ ID NO: 1367 - RNA, 22 nt, Artificial Sequence
  Synthesized RNAi sequence
aacaaaagcacuuuuaucaaaa

SEQ ID NO: 1368 - RNA, 22 nt, Artificial Sequence
  Synthesized RNAi sequence
aacaaagcacucguggacagcu

SEQ ID NO: 1369 - RNA, 22 nt, Artificial Sequence
  Synthesized RNAi sequence
aacaaccauguguugaaccuuu

SEQ ID NO: 1370 - RNA, 22 nt, Artificial Sequence
  Synthesized RNAi sequence
aacaauggaauuagcaggauau

SEQ ID NO: 1371 - RNA, 22 nt, Artificial Sequence
  Synthesized RNAi sequence
aacacgcuuaacaaagcacucg

SEQ ID NO: 1372 - RNA, 22 nt, Artificial Sequence
  Synthesized RNAi sequence
aacacugagguguguaggugcc

SEQ ID NO: 1373 - RNA, 22 nt, Artificial Sequence
  Synthesized RNAi sequence
aacagcuucucuaguagcauga

SEQ ID NO: 1374 - RNA, 22 nt, Artificial Sequence
  Synthesized RNAi sequence
aacaggugcgcucagguccuau

SEQ ID NO: 1375 - RNA, 22 nt, Artificial Sequence
  Synthesized RNAi sequence
aacauaaccuguagguacagca

SEQ ID NO: 1376 - RNA, 22 nt, Artificial Sequence
  Synthesized RNAi sequence
aacaucaaucauaaacggauua

SEQ ID NO: 1377 - RNA, 22 nt, Artificial Sequence
  Synthesized RNAi sequence
aacauguuaggguaaccauuaa

SEQ ID NO: 1378 - RNA, 22 nt, Artificial Sequence
  Synthesized RNAi sequence
aacauuaaaagccacauuuucu

SEQ ID NO: 1379 - RNA, 22 nt, Artificial Sequence
  Synthesized RNAi sequence
aacauuuguacaaucuuuauac

SEQ ID NO: 1380 - RNA, 22 nt, Artificial Sequence
  Synthesized RNAi sequence
aaccaggcaaguuaagguuaga

SEQ ID NO: 1381 - RNA, 22 nt, Artificial Sequence
  Synthesized RNAi sequence
aaccauguguugaaccuuucua

SEQ ID NO: 1382 - RNA, 22 nt, Artificial Sequence
  Synthesized RNAi sequence
aaccauuaacuugauaauucau

SEQ ID NO: 1383 - RNA, 22 nt, Artificial Sequence
  Synthesized RNAi sequence
aacccacaagcuaaagccagcu

SEQ ID NO: 1384 - RNA, 22 nt, Artificial Sequence
  Synthesized RNAi sequence
aacccagugauuaccuuacuac

SEQ ID NO: 1385 - RNA, 22 nt, Artificial Sequence
  Synthesized RNAi sequence
aacccaucauagagaugagucu

SEQ ID NO: 1386 - RNA, 22 nt, Artificial Sequence
  Synthesized RNAi sequence
aaccuguagguacagcaacuag

SEQ ID NO: 1387 - RNA, 22 nt, Artificial Sequence
  Synthesized RNAi sequence
aaccuucaguuuugaauuuagu

SEQ ID NO: 1388 - RNA, 22 nt, Artificial Sequence
  Synthesized RNAi sequence
aaccuuucuacaagccgcauua

SEQ ID NO: 1389 - RNA, 22 nt, Artificial Sequence
  Synthesized RNAi sequence
aacggauuauagacguaaucaa

SEQ ID NO: 1390 - RNA, 22 nt, Artificial Sequence
  Synthesized RNAi sequence
aacguguuauacacguagcaga

SEQ ID NO: 1391 - RNA, 22 nt, Artificial Sequence
  Synthesized RNAi sequence
aacuagcuacaugugcauuacc

SEQ ID NO: 1392 - RNA, 22 nt, Artificial Sequence
  Synthesized RNAi sequence
aacucaaagccaugugcccaua

SEQ ID NO: 1393 - RNA, 22 nt, Artificial Sequence
  Synthesized RNAi sequence
aacugccaccaucacaaccagg

SEQ ID NO: 1394 - RNA, 22 nt, Artificial Sequence
  Synthesized RNAi sequence
aacugggaauuugucugcuaau

SEQ ID NO: 1395 - RNA, 22 nt, Artificial Sequence
  Synthesized RNAi sequence
aacuuccauucuacaucagcuu

SEQ ID NO: 1396 - RNA, 22 nt, Artificial Sequence
  Synthesized RNAi sequence
aagaacugggaauuugucugcu

SEQ ID NO: 1397 - RNA, 22 nt, Artificial Sequence
  Synthesized RNAi sequence
aagcacucguggacagcuagac

SEQ ID NO: 1398 - RNA, 22 nt, Artificial Sequence
  Synthesized RNAi sequence
aagcaguggaaaagcauguggc

SEQ ID NO: 1399 - RNA, 22 nt, Artificial Sequence
  Synthesized RNAi sequence
aagcaucgagauacaaucugua

SEQ ID NO: 1400 - RNA, 22 nt, Artificial Sequence
  Synthesized RNAi sequence
aagcauguggcacgucuaucac

SEQ ID NO: 1401 - RNA, 22 nt, Artificial Sequence
  Synthesized RNAi sequence
aagccaauccaugcacguacau

SEQ ID NO: 1402 - RNA, 22 nt, Artificial Sequence
  Synthesized RNAi sequence
aagccacauuuucuaaacucug

SEQ ID NO: 1403 - RNA, 22 nt, Artificial Sequence
  Synthesized RNAi sequence
aagccagcugagaucaucaugu

SEQ ID NO: 1404 - RNA, 22 nt, Artificial Sequence
  Synthesized RNAi sequence
aagccaugugcccauaagacaa

SEQ ID NO: 1405 - RNA, 22 nt, Artificial Sequence
  Synthesized RNAi sequence
aagccgcauuaaucuucaguuc

SEQ ID NO: 1406 - RNA, 22 nt, Artificial Sequence
  Synthesized RNAi sequence
aagcuaaagccagcugagauca

SEQ ID NO: 1407 - RNA, 22 nt, Artificial Sequence
  Synthesized RNAi sequence
aagcugguguguggaaugcaug

SEQ ID NO: 1408 - RNA, 22 nt, Artificial Sequence
  Synthesized RNAi sequence
aagcuuugucacuacaaggcug

SEQ ID NO: 1409 - RNA, 22 nt, Artificial Sequence
  Synthesized RNAi sequence
aaggaaguccuuuguacauaag

SEQ ID NO: 1410 - RNA, 22 nt, Artificial Sequence
  Synthesized RNAi sequence
aaggcugugcaucauagaacuu

SEQ ID NO: 1411 - RNA, 22 nt, Artificial Sequence
  Synthesized RNAi sequence
aagguaaauugguaccaacagc

SEQ ID NO: 1412 - RNA, 22 nt, Artificial Sequence
  Synthesized RNAi sequence
aagguuagauagcacucuagug

SEQ ID NO: 1413 - RNA, 22 nt, Artificial Sequence
  Synthesized RNAi sequence
aaguaucaaauuguuuguaaac

SEQ ID NO: 1414 - RNA, 22 nt, Artificial Sequence
  Synthesized RNAi sequence
aaguccuuuguacauaaguggu

SEQ ID NO: 1415 - RNA, 22 nt, Artificial Sequence
  Synthesized RNAi sequence
aagucuuguaaaaguguuccag

SEQ ID NO: 1416 - RNA, 22 nt, Artificial Sequence
  Synthesized RNAi sequence
aagugguaugagguguuuaaau

SEQ ID NO: 1417 - RNA, 22 nt, Artificial Sequence
  Synthesized RNAi sequence
aagugucugaagcaguggaaaa

SEQ ID NO: 1418 - RNA, 22 nt, Artificial Sequence
  Synthesized RNAi sequence
aaguguuccagagguuauaagu

SEQ ID NO: 1419 - RNA, 22 nt, Artificial Sequence
  Synthesized RNAi sequence
aaguuaagguuagauagcacuc

SEQ ID NO: 1420 - RNA, 22 nt, Artificial Sequence
  Synthesized RNAi sequence
aauaaugcagcuuuaacaacca

SEQ ID NO: 1421 - RNA, 22 nt, Artificial Sequence
  Synthesized RNAi sequence
aauacagaucaugguugcuuug

SEQ ID NO: 1422 - RNA, 22 nt, Artificial Sequence
  Synthesized RNAi sequence
aauacuucauagaugucaacuc

SEQ ID NO: 1423 - RNA, 22 nt, Artificial Sequence
  Synthesized RNAi sequence
aauagaaugaugccaacaggca

SEQ ID NO: 1424 - RNA, 22 nt, Artificial Sequence
  Synthesized RNAi sequence
aauagcuuuaggguuaccaaug

SEQ ID NO: 1425 - RNA, 22 nt, Artificial Sequence
  Synthesized RNAi sequence
aauaggcauacaccaucuguga

SEQ ID NO: 1426 - RNA, 22 nt, Artificial Sequence
  Synthesized RNAi sequence
aauaguccagucaacacgcuua

SEQ ID NO: 1427 - RNA, 22 nt, Artificial Sequence
  Synthesized RNAi sequence
aaucaaauccaauagaaugaug

SEQ ID NO: 1428 - RNA, 22 nt, Artificial Sequence
  Synthesized RNAi sequence
aaucauaaacggauuauagacg

SEQ ID NO: 1429 - RNA, 22 nt, Artificial Sequence
  Synthesized RNAi sequence
aauccaauagaaugaugccaac

SEQ ID NO: 1430 - RNA, 22 nt, Artificial Sequence
  Synthesized RNAi sequence
aauccaugcacguacaugucuu

SEQ ID NO: 1431 - RNA, 22 nt, Artificial Sequence
  Synthesized RNAi sequence
aaucuacaaacaauggaauuag

SEQ ID NO: 1432 - RNA, 22 nt, Artificial Sequence
  Synthesized RNAi sequence
aaucuauaucugacacuacuug

SEQ ID NO: 1433 - RNA, 22 nt, Artificial Sequence
  Synthesized RNAi sequence
aaucuguacucauuagcaugau

SEQ ID NO: 1434 - RNA, 22 nt, Artificial Sequence
  Synthesized RNAi sequence
aaucuucaguucaucaccaauu

SEQ ID NO: 1435 - RNA, 22 nt, Artificial Sequence
  Synthesized RNAi sequence
aaucuuuauacgcacuacauuc

SEQ ID NO: 1436 - RNA, 22 nt, Artificial Sequence
  Synthesized RNAi sequence
aaugaugccaacaggcauaagu

SEQ ID NO: 1437 - RNA, 22 nt, Artificial Sequence
  Synthesized RNAi sequence
aaugcagcuuuaacaaccaugu

SEQ ID NO: 1438 - RNA, 22 nt, Artificial Sequence
  Synthesized RNAi sequence
aaugcauguuuauuuacauaca

SEQ ID NO: 1439 - RNA, 22 nt, Artificial Sequence
  Synthesized RNAi sequence
aauggaauuagcaggauaucua

SEQ ID NO: 1440 - RNA, 22 nt, Artificial Sequence
  Synthesized RNAi sequence
aaugucgugaagaacugggaau

SEQ ID NO: 1441 - RNA, 22 nt, Artificial Sequence
  Synthesized RNAi sequence
aauguguggcauaagaauagaa

SEQ ID NO: 1442 - RNA, 22 nt, Artificial Sequence
  Synthesized RNAi sequence
aauuaacaaaagcacuuuuauc

SEQ ID NO: 1443 - RNA, 22 nt, Artificial Sequence
  Synthesized RNAi sequence
aauuagcaggauaucuaucgac

SEQ ID NO: 1444 - RNA, 22 nt, Artificial Sequence
  Synthesized RNAi sequence
aauuauaggauauucaauaguc

SEQ ID NO: 1445 - RNA, 22 nt, Artificial Sequence
  Synthesized RNAi sequence
aauuccaaaauaggcauacacc

SEQ ID NO: 1446 - RNA, 22 nt, Artificial Sequence
  Synthesized RNAi sequence
aauucuucuauuuuauaagcuu

SEQ ID NO: 1447 - RNA, 22 nt, Artificial Sequence
  Synthesized RNAi sequence
aauugaucuccaggcggugguu

SEQ ID NO: 1448 - RNA, 22 nt, Artificial Sequence
  Synthesized RNAi sequence
aauugcaacguguuauacacgu

SEQ ID NO: 1449 - RNA, 22 nt, Artificial Sequence
  Synthesized RNAi sequence
aauugguaccaacagcuucucu

SEQ ID NO: 1450 - RNA, 22 nt, Artificial Sequence
  Synthesized RNAi sequence
aauuguuuguaaacccacaagc

SEQ ID NO: 1451 - RNA, 22 nt, Artificial Sequence
  Synthesized RNAi sequence
aauuuagugucaacacugaggu

SEQ ID NO: 1452 - RNA, 22 nt, Artificial Sequence
  Synthesized RNAi sequence
aauuugucagaauguguggcau

SEQ ID NO: 1453 - RNA, 22 nt, Artificial Sequence
  Synthesized RNAi sequence
aauuugucugcuaauaaugcag

SEQ ID NO: 1454 - RNA, 22 nt, Artificial Sequence
  Synthesized RNAi sequence
acaaaagcacuuuuaucaaaag

SEQ ID NO: 1455 - RNA, 22 nt, Artificial Sequence
  Synthesized RNAi sequence
acaaaauacuucauagauguca

SEQ ID NO: 1456 - RNA, 22 nt, Artificial Sequence
  Synthesized RNAi sequence
acaaacaauggaauuagcagga

SEQ ID NO: 1457 - RNA, 22 nt, Artificial Sequence
  Synthesized RNAi sequence
acaaacugccaccaucacaacc

SEQ ID NO: 1458 - RNA, 22 nt, Artificial Sequence
  Synthesized RNAi sequence
acaaagcacucguggacagcua

SEQ ID NO: 1459 - RNA, 22 nt, Artificial Sequence
  Synthesized RNAi sequence
acaacaggugcgcucagguccu

SEQ ID NO: 1460 - RNA, 22 nt, Artificial Sequence
  Synthesized RNAi sequence
acaaccaggcaaguuaagguua

SEQ ID NO: 1461 - RNA, 22 nt, Artificial Sequence
  Synthesized RNAi sequence
acaaccauguguugaaccuuuc

SEQ ID NO: 1462 - RNA, 22 nt, Artificial Sequence
  Synthesized RNAi sequence
acaacuagcuacaugugcauua

SEQ ID NO: 1463 - RNA, 22 nt, Artificial Sequence
  Synthesized RNAi sequence
acaagccgcauuaaucuucagu

SEQ ID NO: 1464 - RNA, 22 nt, Artificial Sequence
  Synthesized RNAi sequence
acaagcuaaagccagcugagau

SEQ ID NO: 1465 - RNA, 22 nt, Artificial Sequence
  Synthesized RNAi sequence
acaaggcugugcaucauagaac

SEQ ID NO: 1466 - RNA, 22 nt, Artificial Sequence
  Synthesized RNAi sequence
acaauacagaucaugguugcuu

SEQ ID NO: 1467 - RNA, 22 nt, Artificial Sequence
  Synthesized RNAi sequence
acaaucuguacucauuagcaug

SEQ ID NO: 1468 - RNA, 22 nt, Artificial Sequence
  Synthesized RNAi sequence
acaaucuuuauacgcacuacau

SEQ ID NO: 1469 - RNA, 22 nt, Artificial Sequence
  Synthesized RNAi sequence
acaauggaauuagcaggauauc

SEQ ID NO: 1470 - RNA, 22 nt, Artificial Sequence
  Synthesized RNAi sequence
acacacuuaauagcuuuagggu

SEQ ID NO: 1471 - RNA, 22 nt, Artificial Sequence
  Synthesized RNAi sequence
acacauaaaccuucaguuuuga

SEQ ID NO: 1472 - RNA, 22 nt, Artificial Sequence
  Synthesized RNAi sequence
acaccaucugugaauuugucag

SEQ ID NO: 1473 - RNA, 22 nt, Artificial Sequence
  Synthesized RNAi sequence
acaccccucgacaucgaagcca

SEQ ID NO: 1474 - RNA, 22 nt, Artificial Sequence
  Synthesized RNAi sequence
acaccuagucaugauugcauca

SEQ ID NO: 1475 - RNA, 22 nt, Artificial Sequence
  Synthesized RNAi sequence
acacgcuuaacaaagcacucgu

SEQ ID NO: 1476 - RNA, 22 nt, Artificial Sequence
  Synthesized RNAi sequence
acacguagcagacuuuaguggu

SEQ ID NO: 1477 - RNA, 22 nt, Artificial Sequence
  Synthesized RNAi sequence
acacuacuuguuuuccaugaga

SEQ ID NO: 1478 - RNA, 22 nt, Artificial Sequence
  Synthesized RNAi sequence
acacugagguguguaggugccu

SEQ ID NO: 1479 - RNA, 22 nt, Artificial Sequence
  Synthesized RNAi sequence
acacuuaauagcuuuaggguua

SEQ ID NO: 1480 - RNA, 22 nt, Artificial Sequence
  Synthesized RNAi sequence
acagacagcaccaccuaaauug

SEQ ID NO: 1481 - RNA, 22 nt, Artificial Sequence
  Synthesized RNAi sequence
acagaucaugguugcuuuguag

SEQ ID NO: 1482 - RNA, 22 nt, Artificial Sequence
  Synthesized RNAi sequence
acagcaccaccuaaauugcaac

SEQ ID NO: 1483 - RNA, 22 nt, Artificial Sequence
  Synthesized RNAi sequence
acagcuagacaccuagucauga

SEQ ID NO: 1484 - RNA, 22 nt, Artificial Sequence
  Synthesized RNAi sequence
acagcuucucuaguagcaugac

SEQ ID NO: 1485 - RNA, 22 nt, Artificial Sequence
  Synthesized RNAi sequence
acaggugcgcucagguccuauu

SEQ ID NO: 1486 - RNA, 22 nt, Artificial Sequence
  Synthesized RNAi sequence
acauaaaccuucaguuuugaau

SEQ ID NO: 1487 - RNA, 22 nt, Artificial Sequence
  Synthesized RNAi sequence
acauaaccuguagguacagcaa

SEQ ID NO: 1488 - RNA, 22 nt, Artificial Sequence
  Synthesized RNAi sequence
acauaagugguaugagguguuu

SEQ ID NO: 1489 - RNA, 22 nt, Artificial Sequence
  Synthesized RNAi sequence
acauaaucuauaucugacacua

SEQ ID NO: 1490 - RNA, 22 nt, Artificial Sequence
  Synthesized RNAi sequence
acauacaaacugccaccaucac

SEQ ID NO: 1491 - RNA, 22 nt, Artificial Sequence
  Synthesized RNAi sequence
acauagacaacaggugcgcuca

SEQ ID NO: 1492 - RNA, 22 nt, Artificial Sequence
  Synthesized RNAi sequence
acaucaaucauaaacggauuau

SEQ ID NO: 1493 - RNA, 22 nt, Artificial Sequence
  Synthesized RNAi sequence
acaucagcuugagguacacacu

SEQ ID NO: 1494 - RNA, 22 nt, Artificial Sequence
  Synthesized RNAi sequence
acaucgaagccaauccaugcac

SEQ ID NO: 1495 - RNA, 22 nt, Artificial Sequence
  Synthesized RNAi sequence
acaugucuuauagcuucuucgc

SEQ ID NO: 1496 - RNA, 22 nt, Artificial Sequence
  Synthesized RNAi sequence
acaugugcauuaccauggacuu

SEQ ID NO: 1497 - RNA, 22 nt, Artificial Sequence
  Synthesized RNAi sequence
acauguuaggguaaccauuaac

SEQ ID NO: 1498 - RNA, 22 nt, Artificial Sequence
  Synthesized RNAi sequence
acauuaaaagccacauuuucua

SEQ ID NO: 1499 - RNA, 22 nt, Artificial Sequence
  Synthesized RNAi sequence
acauuccaaggaaguccuuugu

SEQ ID NO: 1500 - RNA, 22 nt, Artificial Sequence
  Synthesized RNAi sequence
acauugcaauuccaaaauaggc

SEQ ID NO: 1501 - RNA, 22 nt, Artificial Sequence
  Synthesized RNAi sequence
acauuuguacaaucuuuauacg

SEQ ID NO: 1502 - RNA, 22 nt, Artificial Sequence
  Synthesized RNAi sequence
acauuuucuaaacucugaaguc

SEQ ID NO: 1503 - RNA, 22 nt, Artificial Sequence
  Synthesized RNAi sequence
accaacagcuucucuaguagca

SEQ ID NO: 1504 - RNA, 22 nt, Artificial Sequence
  Synthesized RNAi sequence
accaaugucgugaagaacuggg

SEQ ID NO: 1505 - RNA, 22 nt, Artificial Sequence
  Synthesized RNAi sequence
accaauuauaggauauucaaua

SEQ ID NO: 1506 - RNA, 22 nt, Artificial Sequence
  Synthesized RNAi sequence
accaccuaaauugcaacguguu

SEQ ID NO: 1507 - RNA, 22 nt, Artificial Sequence
  Synthesized RNAi sequence
accaggcaaguuaagguuagau

SEQ ID NO: 1508 - RNA, 22 nt, Artificial Sequence
  Synthesized RNAi sequence
accaucacaaccaggcaaguua

SEQ ID NO: 1509 - RNA, 22 nt, Artificial Sequence
  Synthesized RNAi sequence
accauggacuugacaauacaga

SEQ ID NO: 1510 - RNA, 22 nt, Artificial Sequence
  Synthesized RNAi sequence
accauguguugaaccuuucuac

SEQ ID NO: 1511 - RNA, 22 nt, Artificial Sequence
  Synthesized RNAi sequence
accauuaacuugauaauucauu

SEQ ID NO: 1512 - RNA, 22 nt, Artificial Sequence
  Synthesized RNAi sequence
acccacaagcuaaagccagcug

SEQ ID NO: 1513 - RNA, 22 nt, Artificial Sequence
  Synthesized RNAi sequence
acccagugauuaccuuacuaca

SEQ ID NO: 1514 - RNA, 22 nt, Artificial Sequence
  Synthesized RNAi sequence
acccaucauagagaugagucuu

SEQ ID NO: 1515 - RNA, 22 nt, Artificial Sequence
  Synthesized RNAi sequence
accccauuguugaacaucaauc

SEQ ID NO: 1516 - RNA, 22 nt, Artificial Sequence
  Synthesized RNAi sequence
accuaaauugcaacguguuaua

SEQ ID NO: 1517 - RNA, 22 nt, Artificial Sequence
  Synthesized RNAi sequence
accuagucaugauugcaucaca

SEQ ID NO: 1518 - RNA, 22 nt, Artificial Sequence
  Synthesized RNAi sequence
accuguaaaaccccauuguuga

SEQ ID NO: 1519 - RNA, 22 nt, Artificial Sequence
  Synthesized RNAi sequence
accuguagguacagcaacuagg

SEQ ID NO: 1520 - RNA, 22 nt, Artificial Sequence
  Synthesized RNAi sequence
accuucaguuuugaauuuagug

SEQ ID NO: 1521 - RNA, 22 nt, Artificial Sequence
  Synthesized RNAi sequence
accuuucuacaagccgcauuaa

SEQ ID NO: 1522 - RNA, 22 nt, Artificial Sequence
  Synthesized RNAi sequence
acgcacuacauuccaaggaagu

SEQ ID NO: 1523 - RNA, 22 nt, Artificial Sequence
  Synthesized RNAi sequence
acgcuuaacaaagcacucgugg

SEQ ID NO: 1524 - RNA, 22 nt, Artificial Sequence
  Synthesized RNAi sequence
acggauuauagacguaaucaaa

SEQ ID NO: 1525 - RNA, 22 nt, Artificial Sequence
  Synthesized RNAi sequence
acguaaucaaauccaauagaau

SEQ ID NO: 1526 - RNA, 22 nt, Artificial Sequence
  Synthesized RNAi sequence
acguacaugucuuauagcuucu

SEQ ID NO: 1527 - RNA, 22 nt, Artificial Sequence
  Synthesized RNAi sequence
acguagcagacuuuagugguac

SEQ ID NO: 1528 - RNA, 22 nt, Artificial Sequence
  Synthesized RNAi sequence
acgucuaucacauagacaacag

SEQ ID NO: 1529 - RNA, 22 nt, Artificial Sequence
  Synthesized RNAi sequence
acguguuauacacguagcagac

SEQ ID NO: 1530 - RNA, 22 nt, Artificial Sequence
  Synthesized RNAi sequence
acuacaaggcugugcaucauag

SEQ ID NO: 1531 - RNA, 22 nt, Artificial Sequence
  Synthesized RNAi sequence
acuacaaucuuuaaagaguccu

SEQ ID NO: 1532 - RNA, 22 nt, Artificial Sequence
  Synthesized RNAi sequence
acuacauuccaaggaaguccuu

SEQ ID NO: 1533 - RNA, 22 nt, Artificial Sequence
  Synthesized RNAi sequence
acuacuuguuuuccaugagacu

SEQ ID NO: 1534 - RNA, 22 nt, Artificial Sequence
  Synthesized RNAi sequence
acuagcuacaugugcauuacca

SEQ ID NO: 1535 - RNA, 22 nt, Artificial Sequence
  Synthesized RNAi sequence
acucaaagccaugugcccauaa

SEQ ID NO: 1536 - RNA, 22 nt, Artificial Sequence
  Synthesized RNAi sequence
acucauuagcaugaugucuaca

SEQ ID NO: 1537 - RNA, 22 nt, Artificial Sequence
  Synthesized RNAi sequence
acucguggacagcuagacaccu

SEQ ID NO: 1538 - RNA, 22 nt, Artificial Sequence
  Synthesized RNAi sequence
acucuagugucaaaucuacaaa

SEQ ID NO: 1539 - RNA, 22 nt, Artificial Sequence
  Synthesized RNAi sequence
acucugaagucuuguaaaagug

SEQ ID NO: 1540 - RNA, 22 nt, Artificial Sequence
  Synthesized RNAi sequence
acugagguguguaggugccugu

SEQ ID NO: 1541 - RNA, 22 nt, Artificial Sequence
  Synthesized RNAi sequence
acugccaccaucacaaccaggc

SEQ ID NO: 1542 - RNA, 22 nt, Artificial Sequence
  Synthesized RNAi sequence
acugggaauuugucugcuaaua

SEQ ID NO: 1543 - RNA, 22 nt, Artificial Sequence
  Synthesized RNAi sequence
acuuaauagcuuuaggguuacc

SEQ ID NO: 1544 - RNA, 22 nt, Artificial Sequence
  Synthesized RNAi sequence
acuucauagaugucaacucaaa

SEQ ID NO: 1545 - RNA, 22 nt, Artificial Sequence
  Synthesized RNAi sequence
acuuccauucuacaucagcuug

SEQ ID NO: 1546 - RNA, 22 nt, Artificial Sequence
  Synthesized RNAi sequence
acuugacaauacagaucauggu

SEQ ID NO: 1547 - RNA, 22 nt, Artificial Sequence
  Synthesized RNAi sequence
acuuguuuuccaugagacucac

SEQ ID NO: 1548 - RNA, 22 nt, Artificial Sequence
  Synthesized RNAi sequence
acuuuagugguacauaaucuau

SEQ ID NO: 1549 - RNA, 22 nt, Artificial Sequence
  Synthesized RNAi sequence
acuuuuaucaaaagcuggugug

SEQ ID NO: 1550 - RNA, 22 nt, Artificial Sequence
  Synthesized RNAi sequence
agaacugggaauuugucugcua

SEQ ID NO: 1551 - RNA, 22 nt, Artificial Sequence
  Synthesized RNAi sequence
agaacuuccauucuacaucagc

SEQ ID NO: 1552 - RNA, 22 nt, Artificial Sequence
  Synthesized RNAi sequence
agaauagaauaauucuucuauu

SEQ ID NO: 1553 - RNA, 22 nt, Artificial Sequence
  Synthesized RNAi sequence
agaaugaugccaacaggcauaa

SEQ ID NO: 1554 - RNA, 22 nt, Artificial Sequence
  Synthesized RNAi sequence
agaauguguggcauaagaauag

SEQ ID NO: 1555 - RNA, 22 nt, Artificial Sequence
  Synthesized RNAi sequence
agacaccuagucaugauugcau

SEQ ID NO: 1556 - RNA, 22 nt, Artificial Sequence
  Synthesized RNAi sequence
agacagcaccaccuaaauugca

SEQ ID NO: 1557 - RNA, 22 nt, Artificial Sequence
  Synthesized RNAi sequence
agacguaaucaaauccaauaga

SEQ ID NO: 1558 - RNA, 22 nt, Artificial Sequence
  Synthesized RNAi sequence
agacuuuagugguacauaaucu

SEQ ID NO: 1559 - RNA, 22 nt, Artificial Sequence
  Synthesized RNAi sequence
agagaugagucuucuauagguc

SEQ ID NO: 1560 - RNA, 22 nt, Artificial Sequence
  Synthesized RNAi sequence
agagguuauaaguaucaaauug

SEQ ID NO: 1561 - RNA, 22 nt, Artificial Sequence
  Synthesized RNAi sequence
agauacaaucuguacucauuag

SEQ ID NO: 1562 - RNA, 22 nt, Artificial Sequence
  Synthesized RNAi sequence
agauagcacucuagugucaaau

SEQ ID NO: 1563 - RNA, 22 nt, Artificial Sequence
  Synthesized RNAi sequence
agaucaucauguuauaagcauc

SEQ ID NO: 1564 - RNA, 22 nt, Artificial Sequence
  Synthesized RNAi sequence
agaucaugguugcuuuguaggu

SEQ ID NO: 1565 - RNA, 22 nt, Artificial Sequence
  Synthesized RNAi sequence
agaugagucuucuauaggucau

SEQ ID NO: 1566 - RNA, 22 nt, Artificial Sequence
  Synthesized RNAi sequence
agcaccaccuaaauugcaacgu

SEQ ID NO: 1567 - RNA, 22 nt, Artificial Sequence
  Synthesized RNAi sequence
agcacucguggacagcuagaca

SEQ ID NO: 1568 - RNA, 22 nt, Artificial Sequence
  Synthesized RNAi sequence
agcacucuagugucaaaucuac

SEQ ID NO: 1569 - RNA, 22 nt, Artificial Sequence
  Synthesized RNAi sequence
agcagacuuuagugguacauaa

SEQ ID NO: 1570 - RNA, 22 nt, Artificial Sequence
  Synthesized RNAi sequence
agcaggauaucuaucgacauug

SEQ ID NO: 1571 - RNA, 22 nt, Artificial Sequence
  Synthesized RNAi sequence
agcaguggaaaagcauguggca

SEQ ID NO: 1572 - RNA, 22 nt, Artificial Sequence
  Synthesized RNAi sequence
agcaucgagauacaaucuguac

SEQ ID NO: 1573 - RNA, 22 nt, Artificial Sequence
  Synthesized RNAi sequence
agcaugaugucuacagacagca

SEQ ID NO: 1574 - RNA, 22 nt, Artificial Sequence
  Synthesized RNAi sequence
agcauguggcacgucuaucaca

SEQ ID NO: 1575 - RNA, 22 nt, Artificial Sequence
  Synthesized RNAi sequence
agccaauccaugcacguacaug

SEQ ID NO: 1576 - RNA, 22 nt, Artificial Sequence
  Synthesized RNAi sequence
agccacauuuucuaaacucuga

SEQ ID NO: 1577 - RNA, 22 nt, Artificial Sequence
  Synthesized RNAi sequence
agccagcugagaucaucauguu

SEQ ID NO: 1578 - RNA, 22 nt, Artificial Sequence
  Synthesized RNAi sequence
agccaugugcccauaagacaaa

SEQ ID NO: 1579 - RNA, 22 nt, Artificial Sequence
  Synthesized RNAi sequence
agccgcauuaaucuucaguuca

SEQ ID NO: 1580 - RNA, 22 nt, Artificial Sequence
  Synthesized RNAi sequence
agcuaaagccagcugagaucau

SEQ ID NO: 1581 - RNA, 22 nt, Artificial Sequence
  Synthesized RNAi sequence
agcuacaugugcauuaccaugg

SEQ ID NO: 1582 - RNA, 22 nt, Artificial Sequence
  Synthesized RNAi sequence
agcuagacaccuagucaugauu

SEQ ID NO: 1583 - RNA, 22 nt, Artificial Sequence
  Synthesized RNAi sequence
agcugagaucaucauguuauaa

SEQ ID NO: 1584 - RNA, 22 nt, Artificial Sequence
  Synthesized RNAi sequence
agcugguguguggaaugcaugu

SEQ ID NO: 1585 - RNA, 22 nt, Artificial Sequence
  Synthesized RNAi sequence
agcuucucuaguagcaugacac

SEQ ID NO: 1586 - RNA, 22 nt, Artificial Sequence
  Synthesized RNAi sequence
agcuucuucgcgggugauaaac

SEQ ID NO: 1587 - RNA, 22 nt, Artificial Sequence
  Synthesized RNAi sequence
agcuugagguacacacuuaaua

SEQ ID NO: 1588 - RNA, 22 nt, Artificial Sequence
  Synthesized RNAi sequence
agcuuuaacaaccauguguuga

SEQ ID NO: 1589 - RNA, 22 nt, Artificial Sequence
  Synthesized RNAi sequence
agcuuuaggguuaccaaugucg

SEQ ID NO: 1590 - RNA, 22 nt, Artificial Sequence
  Synthesized RNAi sequence
agcuuugucacuacaaggcugu

SEQ ID NO: 1591 - RNA, 22 nt, Artificial Sequence
  Synthesized RNAi sequence
aggaaguccuuuguacauaagu

SEQ ID NO: 1592 - RNA, 22 nt, Artificial Sequence
  Synthesized RNAi sequence
aggauaucuaucgacauugcaa

SEQ ID NO: 1593 - RNA, 22 nt, Artificial Sequence
  Synthesized RNAi sequence
aggauauucaauaguccaguca

SEQ ID NO: 1594 - RNA, 22 nt, Artificial Sequence
  Synthesized RNAi sequence
aggauguaacccagugauuacc

SEQ ID NO: 1595 - RNA, 22 nt, Artificial Sequence
  Synthesized RNAi sequence
aggcaaguuaagguuagauagc

SEQ ID NO: 1596 - RNA, 22 nt, Artificial Sequence
  Synthesized RNAi sequence
aggcauacaccaucugugaauu

SEQ ID NO: 1597 - RNA, 22 nt, Artificial Sequence
  Synthesized RNAi sequence
aggcugugcaucauagaacuuc

SEQ ID NO: 1598 - RNA, 22 nt, Artificial Sequence
  Synthesized RNAi sequence
aggguaaccauuaacuugauaa

SEQ ID NO: 1599 - RNA, 22 nt, Artificial Sequence
  Synthesized RNAi sequence
aggguuaccaaugucgugaaga

SEQ ID NO: 1600 - RNA, 22 nt, Artificial Sequence
  Synthesized RNAi sequence
agguaaauugguaccaacagcu

SEQ ID NO: 1601 - RNA, 22 nt, Artificial Sequence
  Synthesized RNAi sequence
agguacacacuuaauagcuuua

SEQ ID NO: 1602 - RNA, 22 nt, Artificial Sequence
  Synthesized RNAi sequence
agguaugccagguaugucaaca

SEQ ID NO: 1603 - RNA, 22 nt, Artificial Sequence
  Synthesized RNAi sequence
agguaugucaacacauaaaccu

SEQ ID NO: 1604 - RNA, 22 nt, Artificial Sequence
  Synthesized RNAi sequence
aggucauguccuuagguaugcc

SEQ ID NO: 1605 - RNA, 22 nt, Artificial Sequence
  Synthesized RNAi sequence
agguccuauuuucacaaaauac

SEQ ID NO: 1606 - RNA, 22 nt, Artificial Sequence
  Synthesized RNAi sequence
aggugccuguguaggauguaac

SEQ ID NO: 1607 - RNA, 22 nt, Artificial Sequence
  Synthesized RNAi sequence
agguguaucaacauaaccugua

SEQ ID NO: 1608 - RNA, 22 nt, Artificial Sequence
  Synthesized RNAi sequence
agguguguaggugccuguguag

SEQ ID NO: 1609 - RNA, 22 nt, Artificial Sequence
  Synthesized RNAi sequence
agguguuuaaauugaucuccag

SEQ ID NO: 1610 - RNA, 22 nt, Artificial Sequence
  Synthesized RNAi sequence
agguuaccuguaaaaccccauu

SEQ ID NO: 1611 - RNA, 22 nt, Artificial Sequence
  Synthesized RNAi sequence
agguuagauagcacucuagugu

SEQ ID NO: 1612 - RNA, 22 nt, Artificial Sequence
  Synthesized RNAi sequence
agguuauaaguaucaaauuguu

SEQ ID NO: 1613 - RNA, 22 nt, Artificial Sequence
  Synthesized RNAi sequence
aguagcaugacaccccucgaca

SEQ ID NO: 1614 - RNA, 22 nt, Artificial Sequence
  Synthesized RNAi sequence
aguaucaaauuguuuguaaacc

SEQ ID NO: 1615 - RNA, 22 nt, Artificial Sequence
  Synthesized RNAi sequence
agucaacacgcuuaacaaagca

SEQ ID NO: 1616 - RNA, 22 nt, Artificial Sequence
  Synthesized RNAi sequence
agucaugauugcaucacaacua

SEQ ID NO: 1617 - RNA, 22 nt, Artificial Sequence
  Synthesized RNAi sequence
aguccagucaacacgcuuaaca

SEQ ID NO: 1618 - RNA, 22 nt, Artificial Sequence
  Synthesized RNAi sequence
aguccuuuguacauaaguggua

SEQ ID NO: 1619 - RNA, 22 nt, Artificial Sequence
  Synthesized RNAi sequence
agucuucuauaggucauguccu

SEQ ID NO: 1620 - RNA, 22 nt, Artificial Sequence
  Synthesized RNAi sequence
agucuuguaaaaguguuccaga

SEQ ID NO: 1621 - RNA, 22 nt, Artificial Sequence
  Synthesized RNAi sequence
agugauuaccuuacuacaaucu

SEQ ID NO: 1622 - RNA, 22 nt, Artificial Sequence
  Synthesized RNAi sequence
aguggaaaagcauguggcacgu

SEQ ID NO: 1623 - RNA, 22 nt, Artificial Sequence
  Synthesized RNAi sequence
agugguacauaaucuauaucug

SEQ ID NO: 1624 - RNA, 22 nt, Artificial Sequence
  Synthesized RNAi sequence
agugguaugagguguuuaaauu

SEQ ID NO: 1625 - RNA, 22 nt, Artificial Sequence
  Synthesized RNAi sequence
agugucaaaucuacaaacaaug

SEQ ID NO: 1626 - RNA, 22 nt, Artificial Sequence
  Synthesized RNAi sequence
agugucaacacugaggugugua

SEQ ID NO: 1627 - RNA, 22 nt, Artificial Sequence
  Synthesized RNAi sequence
agugucugaagcaguggaaaag

SEQ ID NO: 1628 - RNA, 22 nt, Artificial Sequence
  Synthesized RNAi sequence
aguguuccagagguuauaagua

SEQ ID NO: 1629 - RNA, 22 nt, Artificial Sequence
  Synthesized RNAi sequence
aguuaagguuagauagcacucu

SEQ ID NO: 1630 - RNA, 22 nt, Artificial Sequence
  Synthesized RNAi sequence
aguucaucaccaauuauaggau

SEQ ID NO: 1631 - RNA, 22 nt, Artificial Sequence
  Synthesized RNAi sequence
aguuuugaauuuagugucaaca

SEQ ID NO: 1632 - RNA, 22 nt, Artificial Sequence
  Synthesized RNAi sequence
auaaacauguuaggguaaccau

SEQ ID NO: 1633 - RNA, 22 nt, Artificial Sequence
  Synthesized RNAi sequence
auaaaccuucaguuuugaauuu

SEQ ID NO: 1634 - RNA, 22 nt, Artificial Sequence
  Synthesized RNAi sequence
auaaacggauuauagacguaau

SEQ ID NO: 1635 - RNA, 22 nt, Artificial Sequence
  Synthesized RNAi sequence
auaaccuguagguacagcaacu

SEQ ID NO: 1636 - RNA, 22 nt, Artificial Sequence
  Synthesized RNAi sequence
auaagaauagaauaauucuucu

SEQ ID NO: 1637 - RNA, 22 nt, Artificial Sequence
  Synthesized RNAi sequence
auaagcaucgagauacaaucug

SEQ ID NO: 1638 - RNA, 22 nt, Artificial Sequence
  Synthesized RNAi sequence
auaaguaucaaauuguuuguaa

SEQ ID NO: 1639 - RNA, 22 nt, Artificial Sequence
  Synthesized RNAi sequence
auaagugguaugagguguuuaa

SEQ ID NO: 1640 - RNA, 22 nt, Artificial Sequence
  Synthesized RNAi sequence
auaagugucugaagcaguggaa

SEQ ID NO: 1641 - RNA, 22 nt, Artificial Sequence
  Synthesized RNAi sequence
auaaucuauaucugacacuacu

SEQ ID NO: 1642 - RNA, 22 nt, Artificial Sequence
  Synthesized RNAi sequence
auaaugcagcuuuaacaaccau

SEQ ID NO: 1643 - RNA, 22 nt, Artificial Sequence
  Synthesized RNAi sequence
auaauucauuuuaaaacccauc

SEQ ID NO: 1644 - RNA, 22 nt, Artificial Sequence
  Synthesized RNAi sequence
auacaaacugccaccaucacaa

SEQ ID NO: 1645 - RNA, 22 nt, Artificial Sequence
  Synthesized RNAi sequence
auacaaucuguacucauuagca

SEQ ID NO: 1646 - RNA, 22 nt, Artificial Sequence
  Synthesized RNAi sequence
auacaccaucugugaauuuguc

SEQ ID NO: 1647 - RNA, 22 nt, Artificial Sequence
  Synthesized RNAi sequence
auacacguagcagacuuuagug

SEQ ID NO: 1648 - RNA, 22 nt, Artificial Sequence
  Synthesized RNAi sequence
auacgcacuacauuccaaggaa

SEQ ID NO: 1649 - RNA, 22 nt, Artificial Sequence
  Synthesized RNAi sequence
auacuucauagaugucaacuca

SEQ ID NO: 1650 - RNA, 22 nt, Artificial Sequence
  Synthesized RNAi sequence
auagaacuuccauucuacauca

SEQ ID NO: 1651 - RNA, 22 nt, Artificial Sequence
  Synthesized RNAi sequence
auagaaugaugccaacaggcau

SEQ ID NO: 1652 - RNA, 22 nt, Artificial Sequence
  Synthesized RNAi sequence
auagacaacaggugcgcucagg

SEQ ID NO: 1653 - RNA, 22 nt, Artificial Sequence
  Synthesized RNAi sequence
auagacguaaucaaauccaaua

SEQ ID NO: 1654 - RNA, 22 nt, Artificial Sequence
  Synthesized RNAi sequence
auagagaugagucuucuauagg

SEQ ID NO: 1655 - RNA, 22 nt, Artificial Sequence
  Synthesized RNAi sequence
auagaugucaacucaaagccau

SEQ ID NO: 1656 - RNA, 22 nt, Artificial Sequence
  Synthesized RNAi sequence
auagcacucuagugucaaaucu

SEQ ID NO: 1657 - RNA, 22 nt, Artificial Sequence
  Synthesized RNAi sequence
auagcuucuucgcgggugauaa

SEQ ID NO: 1658 - RNA, 22 nt, Artificial Sequence
  Synthesized RNAi sequence
auagcuuuaggguuaccaaugu

SEQ ID NO: 1659 - RNA, 22 nt, Artificial Sequence
  Synthesized RNAi sequence
auaggauauucaauaguccagu

SEQ ID NO: 1660 - RNA, 22 nt, Artificial Sequence
  Synthesized RNAi sequence
auaggcauacaccaucugugaa

SEQ ID NO: 1661 - RNA, 22 nt, Artificial Sequence
  Synthesized RNAi sequence
auaggucauguccuuagguaug

SEQ ID NO: 1662 - RNA, 22 nt, Artificial Sequence
  Synthesized RNAi sequence
auaguccagucaacacgcuuaa

SEQ ID NO: 1663 - RNA, 22 nt, Artificial Sequence
  Synthesized RNAi sequence
auaucuaucgacauugcaauuc

SEQ ID NO: 1664 - RNA, 22 nt, Artificial Sequence
  Synthesized RNAi sequence
auauucaauaguccagucaaca

SEQ ID NO: 1665 - RNA, 22 nt, Artificial Sequence
  Synthesized RNAi sequence
aucaaaagcugguguguggaau

SEQ ID NO: 1666 - RNA, 22 nt, Artificial Sequence
  Synthesized RNAi sequence
aucaaauccaauagaaugaugc

SEQ ID NO: 1667 - RNA, 22 nt, Artificial Sequence
  Synthesized RNAi sequence
aucaaauuguuuguaaacccac

SEQ ID NO: 1668 - RNA, 22 nt, Artificial Sequence
  Synthesized RNAi sequence
aucaacauaaccuguagguaca

SEQ ID NO: 1669 - RNA, 22 nt, Artificial Sequence
  Synthesized RNAi sequence
aucaaucauaaacggauuauag

SEQ ID NO: 1670 - RNA, 22 nt, Artificial Sequence
  Synthesized RNAi sequence
aucacaaccaggcaaguuaagg

SEQ ID NO: 1671 - RNA, 22 nt, Artificial Sequence
  Synthesized RNAi sequence
aucacaacuagcuacaugugca

SEQ ID NO: 1672 - RNA, 22 nt, Artificial Sequence
  Synthesized RNAi sequence
aucacauagacaacaggugcgc

SEQ ID NO: 1673 - RNA, 22 nt, Artificial Sequence
  Synthesized RNAi sequence
aucaccaauuauaggauauuca

SEQ ID NO: 1674 - RNA, 22 nt, Artificial Sequence
  Synthesized RNAi sequence
aucagcuugagguacacacuua

SEQ ID NO: 1675 - RNA, 22 nt, Artificial Sequence
  Synthesized RNAi sequence
aucauaaacggauuauagacgu

SEQ ID NO: 1676 - RNA, 22 nt, Artificial Sequence
  Synthesized RNAi sequence
aucauagaacuuccauucuaca

SEQ ID NO: 1677 - RNA, 22 nt, Artificial Sequence
  Synthesized RNAi sequence
aucauagagaugagucuucuau

SEQ ID NO: 1678 - RNA, 22 nt, Artificial Sequence
  Synthesized RNAi sequence
aucaucauguuauaagcaucga

SEQ ID NO: 1679 - RNA, 22 nt, Artificial Sequence
  Synthesized RNAi sequence
aucaugguugcuuuguagguua

SEQ ID NO: 1680 - RNA, 22 nt, Artificial Sequence
  Synthesized RNAi sequence
aucauguuauaagcaucgagau

SEQ ID NO: 1681 - RNA, 22 nt, Artificial Sequence
  Synthesized RNAi sequence
auccaauagaaugaugccaaca

SEQ ID NO: 1682 - RNA, 22 nt, Artificial Sequence
  Synthesized RNAi sequence
auccaugcacguacaugucuua

SEQ ID NO: 1683 - RNA, 22 nt, Artificial Sequence
  Synthesized RNAi sequence
aucgaagccaauccaugcacgu

SEQ ID NO: 1684 - RNA, 22 nt, Artificial Sequence
  Synthesized RNAi sequence
aucgacauugcaauuccaaaau

SEQ ID NO: 1685 - RNA, 22 nt, Artificial Sequence
  Synthesized RNAi sequence
aucgagauacaaucuguacuca

SEQ ID NO: 1686 - RNA, 22 nt, Artificial Sequence
  Synthesized RNAi sequence
aucuacaaacaauggaauuagc

SEQ ID NO: 1687 - RNA, 22 nt, Artificial Sequence
  Synthesized RNAi sequence
aucuauaucugacacuacuugu

SEQ ID NO: 1688 - RNA, 22 nt, Artificial Sequence
  Synthesized RNAi sequence
aucuaucgacauugcaauucca

SEQ ID NO: 1689 - RNA, 22 nt, Artificial Sequence
  Synthesized RNAi sequence
aucugacacuacuuguuuucca

SEQ ID NO: 1690 - RNA, 22 nt, Artificial Sequence
  Synthesized RNAi sequence
aucuguacucauuagcaugaug

SEQ ID NO: 1691 - RNA, 22 nt, Artificial Sequence
  Synthesized RNAi sequence
aucugugaauuugucagaaugu

SEQ ID NO: 1692 - RNA, 22 nt, Artificial Sequence
  Synthesized RNAi sequence
aucuuuauacgcacuacauucc

SEQ ID NO: 1693 - RNA, 22 nt, Artificial Sequence
  Synthesized RNAi sequence
augacaccccucgacaucgaag

SEQ ID NO: 1694 - RNA, 22 nt, Artificial Sequence
  Synthesized RNAi sequence
augagguguuuaaauugaucuc

SEQ ID NO: 1695 - RNA, 22 nt, Artificial Sequence
  Synthesized RNAi sequence
augagucuucuauaggucaugu

SEQ ID NO: 1696 - RNA, 22 nt, Artificial Sequence
  Synthesized RNAi sequence
augaugccaacaggcauaagug

SEQ ID NO: 1697 - RNA, 22 nt, Artificial Sequence
  Synthesized RNAi sequence
augaugucuacagacagcacca

SEQ ID NO: 1698 - RNA, 22 nt, Artificial Sequence
  Synthesized RNAi sequence
augauugcaucacaacuagcua

SEQ ID NO: 1699 - RNA, 22 nt, Artificial Sequence
  Synthesized RNAi sequence
augcacguacaugucuuauagc

SEQ ID NO: 1700 - RNA, 22 nt, Artificial Sequence
  Synthesized RNAi sequence
augcagcuuuaacaaccaugug

SEQ ID NO: 1701 - RNA, 22 nt, Artificial Sequence
  Synthesized RNAi sequence
augcauguuuauuuacauacaa

SEQ ID NO: 1702 - RNA, 22 nt, Artificial Sequence
  Synthesized RNAi sequence
augccagguaugucaacacaua

SEQ ID NO: 1703 - RNA, 22 nt, Artificial Sequence
  Synthesized RNAi sequence
auggaauuagcaggauaucuau

SEQ ID NO: 1704 - RNA, 22 nt, Artificial Sequence
  Synthesized RNAi sequence
auggacuugacaauacagauca

SEQ ID NO: 1705 - RNA, 22 nt, Artificial Sequence
  Synthesized RNAi sequence
augguugcuuuguagguuaccu

SEQ ID NO: 1706 - RNA, 22 nt, Artificial Sequence
  Synthesized RNAi sequence
auguaacccagugauuaccuua

SEQ ID NO: 1707 - RNA, 22 nt, Artificial Sequence
  Synthesized RNAi sequence
augucaacacauaaaccuucag

SEQ ID NO: 1708 - RNA, 22 nt, Artificial Sequence
  Synthesized RNAi sequence
auguccuuagguaugccaggua

SEQ ID NO: 1709 - RNA, 22 nt, Artificial Sequence
  Synthesized RNAi sequence
augucgugaagaacugggaauu

SEQ ID NO: 1710 - RNA, 22 nt, Artificial Sequence
  Synthesized RNAi sequence
augucuacagacagcaccaccu

SEQ ID NO: 1711 - RNA, 22 nt, Artificial Sequence
  Synthesized RNAi sequence
augucuuauagcuucuucgcgg

SEQ ID NO: 1712 - RNA, 22 nt, Artificial Sequence
  Synthesized RNAi sequence
augugcauuaccauggacuuga

SEQ ID NO: 1713 - RNA, 22 nt, Artificial Sequence
  Synthesized RNAi sequence
augugcccauaagacaaauacg

SEQ ID NO: 1714 - RNA, 22 nt, Artificial Sequence
  Synthesized RNAi sequence
auguggcacgucuaucacauag

SEQ ID NO: 1715 - RNA, 22 nt, Artificial Sequence
  Synthesized RNAi sequence
auguguggcauaagaauagaau

SEQ ID NO: 1716 - RNA, 22 nt, Artificial Sequence
  Synthesized RNAi sequence
auguguugaaccuuucuacaag

SEQ ID NO: 1717 - RNA, 22 nt, Artificial Sequence
  Synthesized RNAi sequence
auguuaggguaaccauuaacuu

SEQ ID NO: 1718 - RNA, 22 nt, Artificial Sequence
  Synthesized RNAi sequence
auguuauaagcaucgagauaca

SEQ ID NO: 1719 - RNA, 22 nt, Artificial Sequence
  Synthesized RNAi sequence
auguuuauuuacauacaaacug

SEQ ID NO: 1720 - RNA, 22 nt, Artificial Sequence
  Synthesized RNAi sequence
auuaaaagccacauuuucuaaa

SEQ ID NO: 1721 - RNA, 22 nt, Artificial Sequence
  Synthesized RNAi sequence
auuaacaaaagcacuuuuauca

SEQ ID NO: 1722 - RNA, 22 nt, Artificial Sequence
  Synthesized RNAi sequence
auuaaucuucaguucaucacca

SEQ ID NO: 1723 - RNA, 22 nt, Artificial Sequence
  Synthesized RNAi sequence
auuaccauggacuugacaauac

SEQ ID NO: 1724 - RNA, 22 nt, Artificial Sequence
  Synthesized RNAi sequence
auuaccuuacuacaaucuuuaa

SEQ ID NO: 1725 - RNA, 22 nt, Artificial Sequence
  Synthesized RNAi sequence
auuagcaugaugucuacagaca

SEQ ID NO: 1726 - RNA, 22 nt, Artificial Sequence
  Synthesized RNAi sequence
auuauagacguaaucaaaucca

SEQ ID NO: 1727 - RNA, 22 nt, Artificial Sequence
  Synthesized RNAi sequence
auuauaggauauucaauagucc

SEQ ID NO: 1728 - RNA, 22 nt, Artificial Sequence
  Synthesized RNAi sequence
auucaauaguccagucaacacg

SEQ ID NO: 1729 - RNA, 22 nt, Artificial Sequence
  Synthesized RNAi sequence
auuccaaaauaggcauacacca

SEQ ID NO: 1730 - RNA, 22 nt, Artificial Sequence
  Synthesized RNAi sequence
auuccaaggaaguccuuuguac

SEQ ID NO: 1731 - RNA, 22 nt, Artificial Sequence
  Synthesized RNAi sequence
auucuacaucagcuugagguac

SEQ ID NO: 1732 - RNA, 22 nt, Artificial Sequence
  Synthesized RNAi sequence
auucuucuauuuuauaagcuuu

SEQ ID NO: 1733 - RNA, 22 nt, Artificial Sequence
  Synthesized RNAi sequence
auugaucuccaggcggugguuu

SEQ ID NO: 1734 - RNA, 22 nt, Artificial Sequence
  Synthesized RNAi sequence
auugcaacguguuauacacgua

SEQ ID NO: 1735 - RNA, 22 nt, Artificial Sequence
  Synthesized RNAi sequence
auugcaauuccaaaauaggcau

SEQ ID NO: 1736 - RNA, 22 nt, Artificial Sequence
  Synthesized RNAi sequence
auugcaucacaacuagcuacau

SEQ ID NO: 1737 - RNA, 22 nt, Artificial Sequence
  Synthesized RNAi sequence
auugguaccaacagcuucucua

SEQ ID NO: 1738 - RNA, 22 nt, Artificial Sequence
  Synthesized RNAi sequence
auuguugaacaucaaucauaaa

SEQ ID NO: 1739 - RNA, 22 nt, Artificial Sequence
  Synthesized RNAi sequence
auuguuuguaaacccacaagcu

SEQ ID NO: 1740 - RNA, 22 nt, Artificial Sequence
  Synthesized RNAi sequence
auuuacaacauuaaaagccaca

SEQ ID NO: 1741 - RNA, 22 nt, Artificial Sequence
  Synthesized RNAi sequence
auuuacauacaaacugccacca

SEQ ID NO: 1742 - RNA, 22 nt, Artificial Sequence
  Synthesized RNAi sequence
auuuagugucaacacugaggug

SEQ ID NO: 1743 - RNA, 22 nt, Artificial Sequence
  Synthesized RNAi sequence
auuuguacaaucuuuauacgca

SEQ ID NO: 1744 - RNA, 22 nt, Artificial Sequence
  Synthesized RNAi sequence
auuugucagaauguguggcaua

SEQ ID NO: 1745 - RNA, 22 nt, Artificial Sequence
  Synthesized RNAi sequence
auuuuaaaacccaucauagaga

SEQ ID NO: 1746 - RNA, 22 nt, Artificial Sequence
  Synthesized RNAi sequence
auuuuauaagcuuugucacuac

SEQ ID NO: 1747 - RNA, 22 nt, Artificial Sequence
  Synthesized RNAi sequence
auuuucuaaacucugaagucuu

SEQ ID NO: 1748 - RNA, 22 nt, Artificial Sequence
  Synthesized RNAi sequence
uaaaacccaucauagagaugag

SEQ ID NO: 1749 - RNA, 22 nt, Artificial Sequence
  Synthesized RNAi sequence
uaaaaccccauuguugaacauc

SEQ ID NO: 1750 - RNA, 22 nt, Artificial Sequence
  Synthesized RNAi sequence
uaaaagccacauuuucuaaacu

SEQ ID NO: 1751 - RNA, 22 nt, Artificial Sequence
  Synthesized RNAi sequence
uaaaaguguuccagagguuaua

SEQ ID NO: 1752 - RNA, 22 nt, Artificial Sequence
  Synthesized RNAi sequence
uaaacauguuaggguaaccauu

SEQ ID NO: 1753 - RNA, 22 nt, Artificial Sequence
  Synthesized RNAi sequence
uaaacccacaagcuaaagccag

SEQ ID NO: 1754 - RNA, 22 nt, Artificial Sequence
  Synthesized RNAi sequence
uaaaccuucaguuuugaauuua

SEQ ID NO: 1755 - RNA, 22 nt, Artificial Sequence
  Synthesized RNAi sequence
uaaacggauuauagacguaauc

SEQ ID NO: 1756 - RNA, 22 nt, Artificial Sequence
  Synthesized RNAi sequence
uaaacucugaagucuuguaaaa

SEQ ID NO: 1757 - RNA, 22 nt, Artificial Sequence
  Synthesized RNAi sequence
uaaagccagcugagaucaucau

SEQ ID NO: 1758 - RNA, 22 nt, Artificial Sequence
  Synthesized RNAi sequence
uaaauuaacaaaagcacuuuua

SEQ ID NO: 1759 - RNA, 22 nt, Artificial Sequence
  Synthesized RNAi sequence
uaaauugaucuccaggcggugg

SEQ ID NO: 1760 - RNA, 22 nt, Artificial Sequence
  Synthesized RNAi sequence
uaaauugcaacguguuauacac

SEQ ID NO: 1761 - RNA, 22 nt, Artificial Sequence
  Synthesized RNAi sequence
uaaauugguaccaacagcuucu

SEQ ID NO: 1762 - RNA, 22 nt, Artificial Sequence
  Synthesized RNAi sequence
uaacaaaagcacuuuuaucaaa

SEQ ID NO: 1763 - RNA, 22 nt, Artificial Sequence
  Synthesized RNAi sequence
uaacaaagcacucguggacagc

SEQ ID NO: 1764 - RNA, 22 nt, Artificial Sequence
  Synthesized RNAi sequence
uaacaaccauguguugaaccuu

SEQ ID NO: 1765 - RNA, 22 nt, Artificial Sequence
  Synthesized RNAi sequence
uaacauuuguacaaucuuuaua

SEQ ID NO: 1766 - RNA, 22 nt, Artificial Sequence
  Synthesized RNAi sequence
uaaccauuaacuugauaauuca

SEQ ID NO: 1767 - RNA, 22 nt, Artificial Sequence
  Synthesized RNAi sequence
uaacccagugauuaccuuacua

SEQ ID NO: 1768 - RNA, 22 nt, Artificial Sequence
  Synthesized RNAi sequence
uaagaauagaauaauucuucua

SEQ ID NO: 1769 - RNA, 22 nt, Artificial Sequence
  Synthesized RNAi sequence
uaagcaucgagauacaaucugu

SEQ ID NO: 1770 - RNA, 22 nt, Artificial Sequence
  Synthesized RNAi sequence
uaagcuuugucacuacaaggcu

SEQ ID NO: 1771 - RNA, 22 nt, Artificial Sequence
  Synthesized RNAi sequence
uaagguuagauagcacucuagu

SEQ ID NO: 1772 - RNA, 22 nt, Artificial Sequence
  Synthesized RNAi sequence
uaaguaucaaauuguuuguaaa

SEQ ID NO: 1773 - RNA, 22 nt, Artificial Sequence
  Synthesized RNAi sequence
uaagugguaugagguguuuaaa

SEQ ID NO: 1774 - RNA, 22 nt, Artificial Sequence
  Synthesized RNAi sequence
uaagugucugaagcaguggaaa

SEQ ID NO: 1775 - RNA, 22 nt, Artificial Sequence
  Synthesized RNAi sequence
uaaucaaauccaauagaaugau

SEQ ID NO: 1776 - RNA, 22 nt, Artificial Sequence
  Synthesized RNAi sequence
uaaucuauaucugacacuacuu

SEQ ID NO: 1777 - RNA, 22 nt, Artificial Sequence
  Synthesized RNAi sequence
uaaugcagcuuuaacaaccaug

SEQ ID NO: 1778 - RNA, 22 nt, Artificial Sequence
  Synthesized RNAi sequence
uacaaacaauggaauuagcagg

SEQ ID NO: 1779 - RNA, 22 nt, Artificial Sequence
  Synthesized RNAi sequence
uacaaacugccaccaucacaac

SEQ ID NO: 1780 - RNA, 22 nt, Artificial Sequence
  Synthesized RNAi sequence
uacaacauuaaaagccacauuu

SEQ ID NO: 1781 - RNA, 22 nt, Artificial Sequence
  Synthesized RNAi sequence
uacaagccgcauuaaucuucag

SEQ ID NO: 1782 - RNA, 22 nt, Artificial Sequence
  Synthesized RNAi sequence
uacaaggcugugcaucauagaa

SEQ ID NO: 1783 - RNA, 22 nt, Artificial Sequence
  Synthesized RNAi sequence
uacaaucuguacucauuagcau

SEQ ID NO: 1784 - RNA, 22 nt, Artificial Sequence
  Synthesized RNAi sequence
uacaaucuuuauacgcacuaca

SEQ ID NO: 1785 - RNA, 22 nt, Artificial Sequence
  Synthesized RNAi sequence
uacacacuuaauagcuuuaggg

SEQ ID NO: 1786 - RNA, 22 nt, Artificial Sequence
  Synthesized RNAi sequence
uacaccaucugugaauuuguca

SEQ ID NO: 1787 - RNA, 22 nt, Artificial Sequence
  Synthesized RNAi sequence
uacacguagcagacuuuagugg

SEQ ID NO: 1788 - RNA, 22 nt, Artificial Sequence
  Synthesized RNAi sequence
uacagacagcaccaccuaaauu

SEQ ID NO: 1789 - RNA, 22 nt, Artificial Sequence
  Synthesized RNAi sequence
uacauaagugguaugagguguu

SEQ ID NO: 1790 - RNA, 22 nt, Artificial Sequence
  Synthesized RNAi sequence
uacauaaucuauaucugacacu

SEQ ID NO: 1791 - RNA, 22 nt, Artificial Sequence
  Synthesized RNAi sequence
uacauacaaacugccaccauca

SEQ ID NO: 1792 - RNA, 22 nt, Artificial Sequence
  Synthesized RNAi sequence
uacaucagcuugagguacacac

SEQ ID NO: 1793 - RNA, 22 nt, Artificial Sequence
  Synthesized RNAi sequence
uacaugucuuauagcuucuucg

SEQ ID NO: 1794 - RNA, 22 nt, Artificial Sequence
  Synthesized RNAi sequence
uacaugugcauuaccauggacu

SEQ ID NO: 1795 - RNA, 22 nt, Artificial Sequence
  Synthesized RNAi sequence
uacauuccaaggaaguccuuug

SEQ ID NO: 1796 - RNA, 22 nt, Artificial Sequence
  Synthesized RNAi sequence
uaccaacagcuucucuaguagc

SEQ ID NO: 1797 - RNA, 22 nt, Artificial Sequence
  Synthesized RNAi sequence
uaccaaugucgugaagaacugg

SEQ ID NO: 1798 - RNA, 22 nt, Artificial Sequence
  Synthesized RNAi sequence
uaccauggacuugacaauacag

SEQ ID NO: 1799 - RNA, 22 nt, Artificial Sequence
  Synthesized RNAi sequence
uaccuguaaaaccccauuguug

SEQ ID NO: 1800 - RNA, 22 nt, Artificial Sequence
  Synthesized RNAi sequence
uaccuuacuacaaucuuuaaag

SEQ ID NO: 1801 - RNA, 22 nt, Artificial Sequence
  Synthesized RNAi sequence
uacgcacuacauuccaaggaag

SEQ ID NO: 1802 - RNA, 22 nt, Artificial Sequence
  Synthesized RNAi sequence
uacuacaaucuuuaaagagucc

SEQ ID NO: 1803 - RNA, 22 nt, Artificial Sequence
  Synthesized RNAi sequence
uacucauuagcaugaugucuac

SEQ ID NO: 1804 - RNA, 22 nt, Artificial Sequence
  Synthesized RNAi sequence
uacuucauagaugucaacucaa

SEQ ID NO: 1805 - RNA, 22 nt, Artificial Sequence
  Synthesized RNAi sequence
uacuuguuuuccaugagacuca

SEQ ID NO: 1806 - RNA, 22 nt, Artificial Sequence
  Synthesized RNAi sequence
uagaacuuccauucuacaucag

SEQ ID NO: 1807 - RNA, 22 nt, Artificial Sequence
  Synthesized RNAi sequence
uagaaugaugccaacaggcaua

SEQ ID NO: 1808 - RNA, 22 nt, Artificial Sequence
  Synthesized RNAi sequence
uagacaacaggugcgcucaggu

SEQ ID NO: 1809 - RNA, 22 nt, Artificial Sequence
  Synthesized RNAi sequence
uagacaccuagucaugauugca

SEQ ID NO: 1810 - RNA, 22 nt, Artificial Sequence
  Synthesized RNAi sequence
uagacguaaucaaauccaauag

SEQ ID NO: 1811 - RNA, 22 nt, Artificial Sequence
  Synthesized RNAi sequence
uagagaugagucuucuauaggu

SEQ ID NO: 1812 - RNA, 22 nt, Artificial Sequence
  Synthesized RNAi sequence
uagauagcacucuagugucaaa

SEQ ID NO: 1813 - RNA, 22 nt, Artificial Sequence
  Synthesized RNAi sequence
uagaugucaacucaaagccaug

SEQ ID NO: 1814 - RNA, 22 nt, Artificial Sequence
  Synthesized RNAi sequence
uagcacucuagugucaaaucua

SEQ ID NO: 1815 - RNA, 22 nt, Artificial Sequence
  Synthesized RNAi sequence
uagcagacuuuagugguacaua

SEQ ID NO: 1816 - RNA, 22 nt, Artificial Sequence
  Synthesized RNAi sequence
uagcaggauaucuaucgacauu

SEQ ID NO: 1817 - RNA, 22 nt, Artificial Sequence
  Synthesized RNAi sequence
uagcaugacaccccucgacauc

SEQ ID NO: 1818 - RNA, 22 nt, Artificial Sequence
  Synthesized RNAi sequence
uagcaugaugucuacagacagc

SEQ ID NO: 1819 - RNA, 22 nt, Artificial Sequence
  Synthesized RNAi sequence
uagcuacaugugcauuaccaug

SEQ ID NO: 1820 - RNA, 22 nt, Artificial Sequence
  Synthesized RNAi sequence
uagcuucuucgcgggugauaaa

SEQ ID NO: 1821 - RNA, 22 nt, Artificial Sequence
  Synthesized RNAi sequence
uagcuuuaggguuaccaauguc

SEQ ID NO: 1822 - RNA, 22 nt, Artificial Sequence
  Synthesized RNAi sequence
uaggauauucaauaguccaguc

SEQ ID NO: 1823 - RNA, 22 nt, Artificial Sequence
  Synthesized RNAi sequence
uaggauguaacccagugauuac

SEQ ID NO: 1824 - RNA, 22 nt, Artificial Sequence
  Synthesized RNAi sequence
uaggcauacaccaucugugaau

SEQ ID NO: 1825 - RNA, 22 nt, Artificial Sequence
  Synthesized RNAi sequence
uaggguaaccauuaacuugaua

SEQ ID NO: 1826 - RNA, 22 nt, Artificial Sequence
  Synthesized RNAi sequence
uaggguuaccaaugucgugaag

SEQ ID NO: 1827 - RNA, 22 nt, Artificial Sequence
  Synthesized RNAi sequence
uagguaugccagguaugucaac

SEQ ID NO: 1828 - RNA, 22 nt, Artificial Sequence
  Synthesized RNAi sequence
uaggucauguccuuagguaugc

SEQ ID NO: 1829 - RNA, 22 nt, Artificial Sequence
  Synthesized RNAi sequence
uaggugccuguguaggauguaa

SEQ ID NO: 1830 - RNA, 22 nt, Artificial Sequence
  Synthesized RNAi sequence
uagguguaucaacauaaccugu

SEQ ID NO: 1831 - RNA, 22 nt, Artificial Sequence
  Synthesized RNAi sequence
uagguuaccuguaaaaccccau

SEQ ID NO: 1832 - RNA, 22 nt, Artificial Sequence
  Synthesized RNAi sequence
uaguagcaugacaccccucgac

SEQ ID NO: 1833 - RNA, 22 nt, Artificial Sequence
  Synthesized RNAi sequence
uagucaugauugcaucacaacu

SEQ ID NO: 1834 - RNA, 22 nt, Artificial Sequence
  Synthesized RNAi sequence
uaguccagucaacacgcuuaac

SEQ ID NO: 1835 - RNA, 22 nt, Artificial Sequence
  Synthesized RNAi sequence
uagugguacauaaucuauaucu

SEQ ID NO: 1836 - RNA, 22 nt, Artificial Sequence
  Synthesized RNAi sequence
uagugucaacacugaggugugu

SEQ ID NO: 1837 - RNA, 22 nt, Artificial Sequence
  Synthesized RNAi sequence
uauaagcaucgagauacaaucu

SEQ ID NO: 1838 - RNA, 22 nt, Artificial Sequence
  Synthesized RNAi sequence
uauaagcuuugucacuacaagg

SEQ ID NO: 1839 - RNA, 22 nt, Artificial Sequence
  Synthesized RNAi sequence
uauaaguaucaaauuguuugua

SEQ ID NO: 1840 - RNA, 22 nt, Artificial Sequence
  Synthesized RNAi sequence
uauacacguagcagacuuuagu

SEQ ID NO: 1841 - RNA, 22 nt, Artificial Sequence
  Synthesized RNAi sequence
uauacgcacuacauuccaagga

SEQ ID NO: 1842 - RNA, 22 nt, Artificial Sequence
  Synthesized RNAi sequence
uauagcuucuucgcgggugaua

SEQ ID NO: 1843 - RNA, 22 nt, Artificial Sequence
  Synthesized RNAi sequence
uauaggauauucaauaguccag

SEQ ID NO: 1844 - RNA, 22 nt, Artificial Sequence
  Synthesized RNAi sequence
uauaggucauguccuuagguau

SEQ ID NO: 1845 - RNA, 22 nt, Artificial Sequence
  Synthesized RNAi sequence
uaucaaaagcugguguguggaa

SEQ ID NO: 1846 - RNA, 22 nt, Artificial Sequence
  Synthesized RNAi sequence
uaucaaauuguuuguaaaccca

SEQ ID NO: 1847 - RNA, 22 nt, Artificial Sequence
  Synthesized RNAi sequence
uaucaacauaaccuguagguac

SEQ ID NO: 1848 - RNA, 22 nt, Artificial Sequence
  Synthesized RNAi sequence
uaucacauagacaacaggugcg

SEQ ID NO: 1849 - RNA, 22 nt, Artificial Sequence
  Synthesized RNAi sequence
uaucgacauugcaauuccaaaa

SEQ ID NO: 1850 - RNA, 22 nt, Artificial Sequence
  Synthesized RNAi sequence
uaucuaucgacauugcaauucc

SEQ ID NO: 1851 - RNA, 22 nt, Artificial Sequence
  Synthesized RNAi sequence
uaugagguguuuaaauugaucu

SEQ ID NO: 1852 - RNA, 22 nt, Artificial Sequence
  Synthesized RNAi sequence
uaugccagguaugucaacacau

SEQ ID NO: 1853 - RNA, 22 nt, Artificial Sequence
  Synthesized RNAi sequence
uaugucaacacauaaaccuuca

SEQ ID NO: 1854 - RNA, 22 nt, Artificial Sequence
  Synthesized RNAi sequence
uauucaauaguccagucaacac

SEQ ID NO: 1855 - RNA, 22 nt, Artificial Sequence
  Synthesized RNAi sequence
uauuuacaacauuaaaagccac

SEQ ID NO: 1856 - RNA, 22 nt, Artificial Sequence
  Synthesized RNAi sequence
uauuuacauacaaacugccacc

SEQ ID NO: 1857 - RNA, 22 nt, Artificial Sequence
  Synthesized RNAi sequence
uauuuuauaagcuuugucacua

SEQ ID NO: 1858 - RNA, 22 nt, Artificial Sequence
  Synthesized RNAi sequence
ucaaagccaugugcccauaaga

SEQ ID NO: 1859 - RNA, 22 nt, Artificial Sequence
  Synthesized RNAi sequence
ucaaauccaauagaaugaugcc

SEQ ID NO: 1860 - RNA, 22 nt, Artificial Sequence
  Synthesized RNAi sequence
ucaaaucuacaaacaauggaau

SEQ ID NO: 1861 - RNA, 22 nt, Artificial Sequence
  Synthesized RNAi sequence
ucaaauuguuuguaaacccaca

SEQ ID NO: 1862 - RNA, 22 nt, Artificial Sequence
  Synthesized RNAi sequence
ucaacacauaaaccuucaguuu

SEQ ID NO: 1863 - RNA, 22 nt, Artificial Sequence
  Synthesized RNAi sequence
ucaacacgcuuaacaaagcacu

SEQ ID NO: 1864 - RNA, 22 nt, Artificial Sequence
  Synthesized RNAi sequence
ucaacacugagguguguaggug

SEQ ID NO: 1865 - RNA, 22 nt, Artificial Sequence
  Synthesized RNAi sequence
ucaacauaaccuguagguacag

SEQ ID NO: 1866 - RNA, 22 nt, Artificial Sequence
  Synthesized RNAi sequence
ucaacucaaagccaugugccca

SEQ ID NO: 1867 - RNA, 22 nt, Artificial Sequence
  Synthesized RNAi sequence
ucaauaguccagucaacacgcu

SEQ ID NO: 1868 - RNA, 22 nt, Artificial Sequence
  Synthesized RNAi sequence
ucaaucauaaacggauuauaga

SEQ ID NO: 1869 - RNA, 22 nt, Artificial Sequence
  Synthesized RNAi sequence
ucacaaaauacuucauagaugu

SEQ ID NO: 1870 - RNA, 22 nt, Artificial Sequence
  Synthesized RNAi sequence
ucacaaccaggcaaguuaaggu

SEQ ID NO: 1871 - RNA, 22 nt, Artificial Sequence
  Synthesized RNAi sequence
ucacaacuagcuacaugugcau

SEQ ID NO: 1872 - RNA, 22 nt, Artificial Sequence
  Synthesized RNAi sequence
ucacauagacaacaggugcgcu

SEQ ID NO: 1873 - RNA, 22 nt, Artificial Sequence
  Synthesized RNAi sequence
ucaccaauuauaggauauucaa

SEQ ID NO: 1874 - RNA, 22 nt, Artificial Sequence
  Synthesized RNAi sequence
ucacuacaaggcugugcaucau

SEQ ID NO: 1875 - RNA, 22 nt, Artificial Sequence
  Synthesized RNAi sequence
ucagaauguguggcauaagaau

SEQ ID NO: 1876 - RNA, 22 nt, Artificial Sequence
  Synthesized RNAi sequence
ucagcuugagguacacacuuaa

SEQ ID NO: 1877 - RNA, 22 nt, Artificial Sequence
  Synthesized RNAi sequence
ucagguccuauuuucacaaaau

SEQ ID NO: 1878 - RNA, 22 nt, Artificial Sequence
  Synthesized RNAi sequence
ucaguucaucaccaauuauagg

SEQ ID NO: 1879 - RNA, 22 nt, Artificial Sequence
  Synthesized RNAi sequence
ucaguuuugaauuuagugucaa

SEQ ID NO: 1880 - RNA, 22 nt, Artificial Sequence
  Synthesized RNAi sequence
ucauaaacggauuauagacgua

SEQ ID NO: 1881 - RNA, 22 nt, Artificial Sequence
  Synthesized RNAi sequence
ucauagaacuuccauucuacau

SEQ ID NO: 1882 - RNA, 22 nt, Artificial Sequence
  Synthesized RNAi sequence
ucauagagaugagucuucuaua

SEQ ID NO: 1883 - RNA, 22 nt, Artificial Sequence
  Synthesized RNAi sequence
ucauagaugucaacucaaagcc

SEQ ID NO: 1884 - RNA, 22 nt, Artificial Sequence
  Synthesized RNAi sequence
ucaucaccaauuauaggauauu

SEQ ID NO: 1885 - RNA, 22 nt, Artificial Sequence
  Synthesized RNAi sequence
ucaucauguuauaagcaucgag

SEQ ID NO: 1886 - RNA, 22 nt, Artificial Sequence
  Synthesized RNAi sequence
ucaugauugcaucacaacuagc

SEQ ID NO: 1887 - RNA, 22 nt, Artificial Sequence
  Synthesized RNAi sequence
ucaugguugcuuuguagguuac

SEQ ID NO: 1888 - RNA, 22 nt, Artificial Sequence
  Synthesized RNAi sequence
ucauguccuuagguaugccagg

SEQ ID NO: 1889 - RNA, 22 nt, Artificial Sequence
  Synthesized RNAi sequence
ucauguuauaagcaucgagaua

SEQ ID NO: 1890 - RNA, 22 nt, Artificial Sequence
  Synthesized RNAi sequence
ucauuagcaugaugucuacaga

SEQ ID NO: 1891 - RNA, 22 nt, Artificial Sequence
  Synthesized RNAi sequence
ucauuuuaaaacccaucauaga

SEQ ID NO: 1892 - RNA, 22 nt, Artificial Sequence
  Synthesized RNAi sequence
uccaaaauaggcauacaccauc

SEQ ID NO: 1893 - RNA, 22 nt, Artificial Sequence
  Synthesized RNAi sequence
uccaaggaaguccuuuguacau

SEQ ID NO: 1894 - RNA, 22 nt, Artificial Sequence
  Synthesized RNAi sequence
uccaauagaaugaugccaacag

SEQ ID NO: 1895 - RNA, 22 nt, Artificial Sequence
  Synthesized RNAi sequence
uccagagguuauaaguaucaaa

SEQ ID NO: 1896 - RNA, 22 nt, Artificial Sequence
  Synthesized RNAi sequence
uccagucaacacgcuuaacaaa

SEQ ID NO: 1897 - RNA, 22 nt, Artificial Sequence
  Synthesized RNAi sequence
uccaugagacucacauggacug

SEQ ID NO: 1898 - RNA, 22 nt, Artificial Sequence
  Synthesized RNAi sequence
uccaugcacguacaugucuuau

SEQ ID NO: 1899 - RNA, 22 nt, Artificial Sequence
  Synthesized RNAi sequence
uccauucuacaucagcuugagg

SEQ ID NO: 1900 - RNA, 22 nt, Artificial Sequence
  Synthesized RNAi sequence
uccuauuuucacaaaauacuuc

SEQ ID NO: 1901 - RNA, 22 nt, Artificial Sequence
  Synthesized RNAi sequence
uccuuagguaugccagguaugu

SEQ ID NO: 1902 - RNA, 22 nt, Artificial Sequence
  Synthesized RNAi sequence
uccuuuguacauaagugguaug

SEQ ID NO: 1903 - RNA, 22 nt, Artificial Sequence
  Synthesized RNAi sequence
ucgaagccaauccaugcacgua

SEQ ID NO: 1904 - RNA, 22 nt, Artificial Sequence
  Synthesized RNAi sequence
ucgacaucgaagccaauccaug

SEQ ID NO: 1905 - RNA, 22 nt, Artificial Sequence
  Synthesized RNAi sequence
ucgacauugcaauuccaaaaua

SEQ ID NO: 1906 - RNA, 22 nt, Artificial Sequence
  Synthesized RNAi sequence
ucgagauacaaucuguacucau

SEQ ID NO: 1907 - RNA, 22 nt, Artificial Sequence
  Synthesized RNAi sequence
ucgcgggugauaaacauguuag

SEQ ID NO: 1908 - RNA, 22 nt, Artificial Sequence
  Synthesized RNAi sequence
ucgugaagaacugggaauuugu

SEQ ID NO: 1909 - RNA, 22 nt, Artificial Sequence
  Synthesized RNAi sequence
ucguggacagcuagacaccuag

SEQ ID NO: 1910 - RNA, 22 nt, Artificial Sequence
  Synthesized RNAi sequence
ucuaaacucugaagucuuguaa

SEQ ID NO: 1911 - RNA, 22 nt, Artificial Sequence
  Synthesized RNAi sequence
ucuacaaacaauggaauuagca

SEQ ID NO: 1912 - RNA, 22 nt, Artificial Sequence
  Synthesized RNAi sequence
ucuacaagccgcauuaaucuuc

SEQ ID NO: 1913 - RNA, 22 nt, Artificial Sequence
  Synthesized RNAi sequence
ucuacagacagcaccaccuaaa

SEQ ID NO: 1914 - RNA, 22 nt, Artificial Sequence
  Synthesized RNAi sequence
ucuacaucagcuugagguacac

SEQ ID NO: 1915 - RNA, 22 nt, Artificial Sequence
  Synthesized RNAi sequence
ucuaguagcaugacaccccucg

SEQ ID NO: 1916 - RNA, 22 nt, Artificial Sequence
  Synthesized RNAi sequence
ucuagugucaaaucuacaaaca

SEQ ID NO: 1917 - RNA, 22 nt, Artificial Sequence
  Synthesized RNAi sequence
ucuauaggucauguccuuaggu

SEQ ID NO: 1918 - RNA, 22 nt, Artificial Sequence
  Synthesized RNAi sequence
ucuauaucugacacuacuuguu

SEQ ID NO: 1919 - RNA, 22 nt, Artificial Sequence
  Synthesized RNAi sequence
ucuaucacauagacaacaggug

SEQ ID NO: 1920 - RNA, 22 nt, Artificial Sequence
  Synthesized RNAi sequence
ucuaucgacauugcaauuccaa

SEQ ID NO: 1921 - RNA, 22 nt, Artificial Sequence
  Synthesized RNAi sequence
ucuauuuuauaagcuuugucac

SEQ ID NO: 1922 - RNA, 22 nt, Artificial Sequence
  Synthesized RNAi sequence
ucucuaguagcaugacaccccu

SEQ ID NO: 1923 - RNA, 22 nt, Artificial Sequence
  Synthesized RNAi sequence
ucugaagcaguggaaaagcaug

SEQ ID NO: 1924 - RNA, 22 nt, Artificial Sequence
  Synthesized RNAi sequence
ucugaagucuuguaaaaguguu

SEQ ID NO: 1925 - RNA, 22 nt, Artificial Sequence
  Synthesized RNAi sequence
ucugacacuacuuguuuuccau

SEQ ID NO: 1926 - RNA, 22 nt, Artificial Sequence
  Synthesized RNAi sequence
ucugcuaauaaugcagcuuuaa

SEQ ID NO: 1927 - RNA, 22 nt, Artificial Sequence
  Synthesized RNAi sequence
ucuguacucauuagcaugaugu

SEQ ID NO: 1928 - RNA, 22 nt, Artificial Sequence
  Synthesized RNAi sequence
ucugugaauuugucagaaugug

SEQ ID NO: 1929 - RNA, 22 nt, Artificial Sequence
  Synthesized RNAi sequence
ucuuauagcuucuucgcgggug

SEQ ID NO: 1930 - RNA, 22 nt, Artificial Sequence
  Synthesized RNAi sequence
ucuucaguucaucaccaauuau

SEQ ID NO: 1931 - RNA, 22 nt, Artificial Sequence
  Synthesized RNAi sequence
ucuucgcgggugauaaacaugu

SEQ ID NO: 1932 - RNA, 22 nt, Artificial Sequence
  Synthesized RNAi sequence
ucuucuauaggucauguccuua

SEQ ID NO: 1933 - RNA, 22 nt, Artificial Sequence
  Synthesized RNAi sequence
ucuuguaaaaguguuccagagg

SEQ ID NO: 1934 - RNA, 22 nt, Artificial Sequence
  Synthesized RNAi sequence
ucuuuauacgcacuacauucca

SEQ ID NO: 1935 - RNA, 22 nt, Artificial Sequence
  Synthesized RNAi sequence
ugaacaucaaucauaaacggau

SEQ ID NO: 1936 - RNA, 22 nt, Artificial Sequence
  Synthesized RNAi sequence
ugaaccuuucuacaagccgcau

SEQ ID NO: 1937 - RNA, 22 nt, Artificial Sequence
  Synthesized RNAi sequence
ugaagaacugggaauuugucug

SEQ ID NO: 1938 - RNA, 22 nt, Artificial Sequence
  Synthesized RNAi sequence
ugaagcaguggaaaagcaugug

SEQ ID NO: 1939 - RNA, 22 nt, Artificial Sequence
  Synthesized RNAi sequence
ugaagucuuguaaaaguguucc

SEQ ID NO: 1940 - RNA, 22 nt, Artificial Sequence
  Synthesized RNAi sequence
ugaauuuagugucaacacugag

SEQ ID NO: 1941 - RNA, 22 nt, Artificial Sequence
  Synthesized RNAi sequence
ugaauuugucagaauguguggc

SEQ ID NO: 1942 - RNA, 22 nt, Artificial Sequence
  Synthesized RNAi sequence
ugacaauacagaucaugguugc

SEQ ID NO: 1943 - RNA, 22 nt, Artificial Sequence
  Synthesized RNAi sequence
ugacaccccucgacaucgaagc

SEQ ID NO: 1944 - RNA, 22 nt, Artificial Sequence
  Synthesized RNAi sequence
ugacacuacuuguuuuccauga

SEQ ID NO: 1945 - RNA, 22 nt, Artificial Sequence
  Synthesized RNAi sequence
ugagaucaucauguuauaagca

SEQ ID NO: 1946 - RNA, 22 nt, Artificial Sequence
  Synthesized RNAi sequence
ugagguacacacuuaauagcuu

SEQ ID NO: 1947 - RNA, 22 nt, Artificial Sequence
  Synthesized RNAi sequence
ugagguguguaggugccugugu

SEQ ID NO: 1948 - RNA, 22 nt, Artificial Sequence
  Synthesized RNAi sequence
ugagguguuuaaauugaucucc

SEQ ID NO: 1949 - RNA, 22 nt, Artificial Sequence
  Synthesized RNAi sequence
ugagucuucuauaggucauguc

SEQ ID NO: 1950 - RNA, 22 nt, Artificial Sequence
  Synthesized RNAi sequence
ugauaaacauguuaggguaacc

SEQ ID NO: 1951 - RNA, 22 nt, Artificial Sequence
  Synthesized RNAi sequence
ugaucuccaggcggugguuuag

SEQ ID NO: 1952 - RNA, 22 nt, Artificial Sequence
  Synthesized RNAi sequence
ugaugccaacaggcauaagugu

SEQ ID NO: 1953 - RNA, 22 nt, Artificial Sequence
  Synthesized RNAi sequence
ugauuaccuuacuacaaucuuu

SEQ ID NO: 1954 - RNA, 22 nt, Artificial Sequence
  Synthesized RNAi sequence
ugauugcaucacaacuagcuac

SEQ ID NO: 1955 - RNA, 22 nt, Artificial Sequence
  Synthesized RNAi sequence
ugcaacguguuauacacguagc

SEQ ID NO: 1956 - RNA, 22 nt, Artificial Sequence
  Synthesized RNAi sequence
ugcaauuccaaaauaggcauac

SEQ ID NO: 1957 - RNA, 22 nt, Artificial Sequence
  Synthesized RNAi sequence
ugcacguacaugucuuauagcu

SEQ ID NO: 1958 - RNA, 22 nt, Artificial Sequence
  Synthesized RNAi sequence
ugcagcuuuaacaaccaugugu

SEQ ID NO: 1959 - RNA, 22 nt, Artificial Sequence
  Synthesized RNAi sequence
ugcaucacaacuagcuacaugu

SEQ ID NO: 1960 - RNA, 22 nt, Artificial Sequence
  Synthesized RNAi sequence
ugcaucauagaacuuccauucu

SEQ ID NO: 1961 - RNA, 22 nt, Artificial Sequence
  Synthesized RNAi sequence
ugcauguuuauuuacauacaaa

SEQ ID NO: 1962 - RNA, 22 nt, Artificial Sequence
  Synthesized RNAi sequence
ugcauuaccauggacuugacaa

SEQ ID NO: 1963 - RNA, 22 nt, Artificial Sequence
  Synthesized RNAi sequence
ugccaacaggcauaagugucug

SEQ ID NO: 1964 - RNA, 22 nt, Artificial Sequence
  Synthesized RNAi sequence
ugccaccaucacaaccaggcaa

SEQ ID NO: 1965 - RNA, 22 nt, Artificial Sequence
  Synthesized RNAi sequence
ugccagguaugucaacacauaa

SEQ ID NO: 1966 - RNA, 22 nt, Artificial Sequence
  Synthesized RNAi sequence
ugcccauaagacaaauacgacu

SEQ ID NO: 1967 - RNA, 22 nt, Artificial Sequence
  Synthesized RNAi sequence
ugccuguguaggauguaaccca

SEQ ID NO: 1968 - RNA, 22 nt, Artificial Sequence
  Synthesized RNAi sequence
ugcgcucagguccuauuuucac

SEQ ID NO: 1969 - RNA, 22 nt, Artificial Sequence
  Synthesized RNAi sequence
ugcuaauaaugcagcuuuaaca

SEQ ID NO: 1970 - RNA, 22 nt, Artificial Sequence
  Synthesized RNAi sequence
ugcuuuguagguuaccuguaaa

SEQ ID NO: 1971 - RNA, 22 nt, Artificial Sequence
  Synthesized RNAi sequence
uggaaaagcauguggcacgucu

SEQ ID NO: 1972 - RNA, 22 nt, Artificial Sequence
  Synthesized RNAi sequence
uggaauuagcaggauaucuauc

SEQ ID NO: 1973 - RNA, 22 nt, Artificial Sequence
  Synthesized RNAi sequence
uggacagcuagacaccuaguca

SEQ ID NO: 1974 - RNA, 22 nt, Artificial Sequence
  Synthesized RNAi sequence
uggacuugacaauacagaucau

SEQ ID NO: 1975 - RNA, 22 nt, Artificial Sequence
  Synthesized RNAi sequence
uggcacgucuaucacauagaca

SEQ ID NO: 1976 - RNA, 22 nt, Artificial Sequence
  Synthesized RNAi sequence
uggcauaagaauagaauaauuc

SEQ ID NO: 1977 - RNA, 22 nt, Artificial Sequence
  Synthesized RNAi sequence
ugggaauuugucugcuaauaau

SEQ ID NO: 1978 - RNA, 22 nt, Artificial Sequence
  Synthesized RNAi sequence
ugguacauaaucuauaucugac

SEQ ID NO: 1979 - RNA, 22 nt, Artificial Sequence
  Synthesized RNAi sequence
ugguaccaacagcuucucuagu

SEQ ID NO: 1980 - RNA, 22 nt, Artificial Sequence
  Synthesized RNAi sequence
ugguaugagguguuuaaauuga

SEQ ID NO: 1981 - RNA, 22 nt, Artificial Sequence
  Synthesized RNAi sequence
ugguguguggaaugcauguuua

SEQ ID NO: 1982 - RNA, 22 nt, Artificial Sequence
  Synthesized RNAi sequence
ugguugcuuuguagguuaccug

SEQ ID NO: 1983 - RNA, 22 nt, Artificial Sequence
  Synthesized RNAi sequence
uguaaaaccccauuguugaaca

SEQ ID NO: 1984 - RNA, 22 nt, Artificial Sequence
  Synthesized RNAi sequence
uguaaaaguguuccagagguua

SEQ ID NO: 1985 - RNA, 22 nt, Artificial Sequence
  Synthesized RNAi sequence
uguaaacccacaagcuaaagcc

SEQ ID NO: 1986 - RNA, 22 nt, Artificial Sequence
  Synthesized RNAi sequence
uguaacccagugauuaccuuac

SEQ ID NO: 1987 - RNA, 22 nt, Artificial Sequence
  Synthesized RNAi sequence
uguacaaucuuuauacgcacua

SEQ ID NO: 1988 - RNA, 22 nt, Artificial Sequence
  Synthesized RNAi sequence
uguacauaagugguaugaggug

SEQ ID NO: 1989 - RNA, 22 nt, Artificial Sequence
  Synthesized RNAi sequence
uguacucauuagcaugaugucu

SEQ ID NO: 1990 - RNA, 22 nt, Artificial Sequence
  Synthesized RNAi sequence
uguaggauguaacccagugauu

SEQ ID NO: 1991 - RNA, 22 nt, Artificial Sequence
  Synthesized RNAi sequence
uguaggugccuguguaggaugu

SEQ ID NO: 1992 - RNA, 22 nt, Artificial Sequence
  Synthesized RNAi sequence
uguagguuaccuguaaaacccc

SEQ ID NO: 1993 - RNA, 22 nt, Artificial Sequence
  Synthesized RNAi sequence
uguaucaacauaaccuguaggu

SEQ ID NO: 1994 - RNA, 22 nt, Artificial Sequence
  Synthesized RNAi sequence
ugucaaaucuacaaacaaugga

SEQ ID NO: 1995 - RNA, 22 nt, Artificial Sequence
  Synthesized RNAi sequence
ugucaacacauaaaccuucagu

SEQ ID NO: 1996 - RNA, 22 nt, Artificial Sequence
  Synthesized RNAi sequence
ugucaacacugagguguguagg

SEQ ID NO: 1997 - RNA, 22 nt, Artificial Sequence
  Synthesized RNAi sequence
ugucacuacaaggcugugcauc

SEQ ID NO: 1998 - RNA, 22 nt, Artificial Sequence
  Synthesized RNAi sequence
ugucagaauguguggcauaaga

SEQ ID NO: 1999 - RNA, 22 nt, Artificial Sequence
  Synthesized RNAi sequence
uguccuuagguaugccagguau

SEQ ID NO: 2000 - RNA, 22 nt, Artificial Sequence
  Synthesized RNAi sequence
ugucgugaagaacugggaauuu

SEQ ID NO: 2001 - RNA, 22 nt, Artificial Sequence
  Synthesized RNAi sequence
ugucuacagacagcaccaccua

SEQ ID NO: 2002 - RNA, 22 nt, Artificial Sequence
  Synthesized RNAi sequence
ugucugaagcaguggaaaagca

SEQ ID NO: 2003 - RNA, 22 nt, Artificial Sequence
  Synthesized RNAi sequence
ugucugcuaauaaugcagcuuu

SEQ ID NO: 2004 - RNA, 22 nt, Artificial Sequence
  Synthesized RNAi sequence
ugucuuauagcuucuucgcggg

SEQ ID NO: 2005 - RNA, 22 nt, Artificial Sequence
  Synthesized RNAi sequence
ugugaauuugucagaaugugug

SEQ ID NO: 2006 - RNA, 22 nt, Artificial Sequence
  Synthesized RNAi sequence
ugugcaucauagaacuuccauu

SEQ ID NO: 2007 - RNA, 22 nt, Artificial Sequence
  Synthesized RNAi sequence
ugugcauuaccauggacuugac

SEQ ID NO: 2008 - RNA, 22 nt, Artificial Sequence
  Synthesized RNAi sequence
ugugcccauaagacaaauacga

SEQ ID NO: 2009 - RNA, 22 nt, Artificial Sequence
  Synthesized RNAi sequence
uguggaaugcauguuuauuuac

SEQ ID NO: 2010 - RNA, 22 nt, Artificial Sequence
  Synthesized RNAi sequence
uguggcacgucuaucacauaga

SEQ ID NO: 2011 - RNA, 22 nt, Artificial Sequence
  Synthesized RNAi sequence
uguggcauaagaauagaauaau

SEQ ID NO: 2012 - RNA, 22 nt, Artificial Sequence
  Synthesized RNAi sequence
uguguaggauguaacccaguga

SEQ ID NO: 2013 - RNA, 22 nt, Artificial Sequence
  Synthesized RNAi sequence
uguguaggugccuguguaggau

SEQ ID NO: 2014 - RNA, 22 nt, Artificial Sequence
  Synthesized RNAi sequence
uguguggaaugcauguuuauuu

SEQ ID NO: 2015 - RNA, 22 nt, Artificial Sequence
  Synthesized RNAi sequence
uguguggcauaagaauagaaua

SEQ ID NO: 2016 - RNA, 22 nt, Artificial Sequence
  Synthesized RNAi sequence
uguguugaaccuuucuacaagc

SEQ ID NO: 2017 - RNA, 22 nt, Artificial Sequence
  Synthesized RNAi sequence
uguuaggguaaccauuaacuug

SEQ ID NO: 2018 - RNA, 22 nt, Artificial Sequence
  Synthesized RNAi sequence
uguuauaagcaucgagauacaa

SEQ ID NO: 2019 - RNA, 22 nt, Artificial Sequence
  Synthesized RNAi sequence
uguuauacacguagcagacuuu

SEQ ID NO: 2020 - RNA, 22 nt, Artificial Sequence
  Synthesized RNAi sequence
uguuccagagguuauaaguauc

SEQ ID NO: 2021 - RNA, 22 nt, Artificial Sequence
  Synthesized RNAi sequence
uguugaacaucaaucauaaacg

SEQ ID NO: 2022 - RNA, 22 nt, Artificial Sequence
  Synthesized RNAi sequence
uguugaaccuuucuacaagccg

SEQ ID NO: 2023 - RNA, 22 nt, Artificial Sequence
  Synthesized RNAi sequence
uguuuaaauugaucuccaggcg

SEQ ID NO: 2024 - RNA, 22 nt, Artificial Sequence
  Synthesized RNAi sequence
uguuuauuuacauacaaacugc

SEQ ID NO: 2025 - RNA, 22 nt, Artificial Sequence
  Synthesized RNAi sequence
uguuuguaaacccacaagcuaa

SEQ ID NO: 2026 - RNA, 22 nt, Artificial Sequence
  Synthesized RNAi sequence
uguuuuccaugagacucacaug

SEQ ID NO: 2027 - RNA, 22 nt, Artificial Sequence
  Synthesized RNAi sequence
uuaaaacccaucauagagauga

SEQ ID NO: 2028 - RNA, 22 nt, Artificial Sequence
  Synthesized RNAi sequence
uuaaauugaucuccaggcggug

SEQ ID NO: 2029 - RNA, 22 nt, Artificial Sequence
  Synthesized RNAi sequence
uuaacaaaagcacuuuuaucaa

SEQ ID NO: 2030 - RNA, 22 nt, Artificial Sequence
  Synthesized RNAi sequence
uuaacaaagcacucguggacag

SEQ ID NO: 2031 - RNA, 22 nt, Artificial Sequence
  Synthesized RNAi sequence
uuaacaaccauguguugaaccu

SEQ ID NO: 2032 - RNA, 22 nt, Artificial Sequence
  Synthesized RNAi sequence
uuaacauuuguacaaucuuuau

SEQ ID NO: 2033 - RNA, 22 nt, Artificial Sequence
  Synthesized RNAi sequence
uuaagguuagauagcacucuag

SEQ ID NO: 2034 - RNA, 22 nt, Artificial Sequence
  Synthesized RNAi sequence
uuaauagcuuuaggguuaccaa

SEQ ID NO: 2035 - RNA, 22 nt, Artificial Sequence
  Synthesized RNAi sequence
uuaaucuucaguucaucaccaa

SEQ ID NO: 2036 - RNA, 22 nt, Artificial Sequence
  Synthesized RNAi sequence
uuacaacauuaaaagccacauu

SEQ ID NO: 2037 - RNA, 22 nt, Artificial Sequence
  Synthesized RNAi sequence
uuacauacaaacugccaccauc

SEQ ID NO: 2038 - RNA, 22 nt, Artificial Sequence
  Synthesized RNAi sequence
uuaccaaugucgugaagaacug

SEQ ID NO: 2039 - RNA, 22 nt, Artificial Sequence
  Synthesized RNAi sequence
uuaccauggacuugacaauaca

SEQ ID NO: 2040 - RNA, 22 nt, Artificial Sequence
  Synthesized RNAi sequence
uuaccuguaaaaccccauuguu

SEQ ID NO: 2041 - RNA, 22 nt, Artificial Sequence
  Synthesized RNAi sequence
uuaccuuacuacaaucuuuaaa

SEQ ID NO: 2042 - RNA, 22 nt, Artificial Sequence
  Synthesized RNAi sequence
uuacuacaaucuuuaaagaguc

SEQ ID NO: 2043 - RNA, 22 nt, Artificial Sequence
  Synthesized RNAi sequence
uuagauagcacucuagugucaa

SEQ ID NO: 2044 - RNA, 22 nt, Artificial Sequence
  Synthesized RNAi sequence
uuagcaggauaucuaucgacau

SEQ ID NO: 2045 - RNA, 22 nt, Artificial Sequence
  Synthesized RNAi sequence
uuagcaugaugucuacagacag

SEQ ID NO: 2046 - RNA, 22 nt, Artificial Sequence
  Synthesized RNAi sequence
uuaggguuaccaaugucgugaa

SEQ ID NO: 2047 - RNA, 22 nt, Artificial Sequence
  Synthesized RNAi sequence
uuagguaugccagguaugucaa

SEQ ID NO: 2048 - RNA, 22 nt, Artificial Sequence
  Synthesized RNAi sequence
uuagugguacauaaucuauauc

SEQ ID NO: 2049 - RNA, 22 nt, Artificial Sequence
  Synthesized RNAi sequence
uuagugucaacacugaggugug

SEQ ID NO: 2050 - RNA, 22 nt, Artificial Sequence
  Synthesized RNAi sequence
uuauaagcaucgagauacaauc

SEQ ID NO: 2051 - RNA, 22 nt, Artificial Sequence
  Synthesized RNAi sequence
uuauaagcuuugucacuacaag

SEQ ID NO: 2052 - RNA, 22 nt, Artificial Sequence
  Synthesized RNAi sequence
uuauaaguaucaaauuguuugu

SEQ ID NO: 2053 - RNA, 22 nt, Artificial Sequence
  Synthesized RNAi sequence
uuauacacguagcagacuuuag

SEQ ID NO: 2054 - RNA, 22 nt, Artificial Sequence
  Synthesized RNAi sequence
uuauacgcacuacauuccaagg

SEQ ID NO: 2055 - RNA, 22 nt, Artificial Sequence
  Synthesized RNAi sequence
uuauagacguaaucaaauccaa

SEQ ID NO: 2056 - RNA, 22 nt, Artificial Sequence
  Synthesized RNAi sequence
uuauagcuucuucgcgggugau

SEQ ID NO: 2057 - RNA, 22 nt, Artificial Sequence
  Synthesized RNAi sequence
uuauaggauauucaauagucca

SEQ ID NO: 2058 - RNA, 22 nt, Artificial Sequence
  Synthesized RNAi sequence
uuaucaaaagcuggugugugga

SEQ ID NO: 2059 - RNA, 22 nt, Artificial Sequence
  Synthesized RNAi sequence
uuauuuacaacauuaaaagcca

SEQ ID NO: 2060 - RNA, 22 nt, Artificial Sequence
  Synthesized RNAi sequence
uuauuuacauacaaacugccac

SEQ ID NO: 2061 - RNA, 22 nt, Artificial Sequence
  Synthesized RNAi sequence
uucaauaguccagucaacacgc

SEQ ID NO: 2062 - RNA, 22 nt, Artificial Sequence
  Synthesized RNAi sequence
uucacaaaauacuucauagaug

SEQ ID NO: 2063 - RNA, 22 nt, Artificial Sequence
  Synthesized RNAi sequence
uucaguucaucaccaauuauag

SEQ ID NO: 2064 - RNA, 22 nt, Artificial Sequence
  Synthesized RNAi sequence
uucaguuuugaauuuaguguca

SEQ ID NO: 2065 - RNA, 22 nt, Artificial Sequence
  Synthesized RNAi sequence
uucauagaugucaacucaaagc

SEQ ID NO: 2066 - RNA, 22 nt, Artificial Sequence
  Synthesized RNAi sequence
uucaucaccaauuauaggauau

SEQ ID NO: 2067 - RNA, 22 nt, Artificial Sequence
  Synthesized RNAi sequence
uucauuuuaaaacccaucauag

SEQ ID NO: 2068 - RNA, 22 nt, Artificial Sequence
  Synthesized RNAi sequence
uuccaaaauaggcauacaccau

SEQ ID NO: 2069 - RNA, 22 nt, Artificial Sequence
  Synthesized RNAi sequence
uuccagagguuauaaguaucaa

SEQ ID NO: 2070 - RNA, 22 nt, Artificial Sequence
  Synthesized RNAi sequence
uuccaugagacucacauggacu

SEQ ID NO: 2071 - RNA, 22 nt, Artificial Sequence
  Synthesized RNAi sequence
uuccauucuacaucagcuugag

SEQ ID NO: 2072 - RNA, 22 nt, Artificial Sequence
  Synthesized RNAi sequence
uucgcgggugauaaacauguua

SEQ ID NO: 2073 - RNA, 22 nt, Artificial Sequence
  Synthesized RNAi sequence
uucuaaacucugaagucuugua

SEQ ID NO: 2074 - RNA, 22 nt, Artificial Sequence
  Synthesized RNAi sequence
uucuacaagccgcauuaaucuu

SEQ ID NO: 2075 - RNA, 22 nt, Artificial Sequence
  Synthesized RNAi sequence
uucuacaucagcuugagguaca

SEQ ID NO: 2076 - RNA, 22 nt, Artificial Sequence
  Synthesized RNAi sequence
uucuauaggucauguccuuagg

SEQ ID NO: 2077 - RNA, 22 nt, Artificial Sequence
  Synthesized RNAi sequence
uucuauuuuauaagcuuuguca

SEQ ID NO: 2078 - RNA, 22 nt, Artificial Sequence
  Synthesized RNAi sequence
uucucuaguagcaugacacccc

SEQ ID NO: 2079 - RNA, 22 nt, Artificial Sequence
  Synthesized RNAi sequence
uucuucgcgggugauaaacaug

SEQ ID NO: 2080 - RNA, 22 nt, Artificial Sequence
  Synthesized RNAi sequence
uugaacaucaaucauaaacgga

SEQ ID NO: 2081 - RNA, 22 nt, Artificial Sequence
  Synthesized RNAi sequence
uugaaccuuucuacaagccgca

SEQ ID NO: 2082 - RNA, 22 nt, Artificial Sequence
  Synthesized RNAi sequence
uugaauuuagugucaacacuga

SEQ ID NO: 2083 - RNA, 22 nt, Artificial Sequence
  Synthesized RNAi sequence
uugacaauacagaucaugguug

SEQ ID NO: 2084 - RNA, 22 nt, Artificial Sequence
  Synthesized RNAi sequence
uugagguacacacuuaauagcu

SEQ ID NO: 2085 - RNA, 22 nt, Artificial Sequence
  Synthesized RNAi sequence
uugaucuccaggcggugguuua

SEQ ID NO: 2086 - RNA, 22 nt, Artificial Sequence
  Synthesized RNAi sequence
uugcaacguguuauacacguag

SEQ ID NO: 2087 - RNA, 22 nt, Artificial Sequence
  Synthesized RNAi sequence
uugcaauuccaaaauaggcaua

SEQ ID NO: 2088 - RNA, 22 nt, Artificial Sequence
  Synthesized RNAi sequence
uugcaucacaacuagcuacaug

SEQ ID NO: 2089 - RNA, 22 nt, Artificial Sequence
  Synthesized RNAi sequence
uugcuuuguagguuaccuguaa

SEQ ID NO: 2090 - RNA, 22 nt, Artificial Sequence
  Synthesized RNAi sequence
uugguaccaacagcuucucuag

SEQ ID NO: 2091 - RNA, 22 nt, Artificial Sequence
  Synthesized RNAi sequence
uuguaaaaguguuccagagguu

SEQ ID NO: 2092 - RNA, 22 nt, Artificial Sequence
  Synthesized RNAi sequence
uuguaaacccacaagcuaaagc

SEQ ID NO: 2093 - RNA, 22 nt, Artificial Sequence
  Synthesized RNAi sequence
uuguacaaucuuuauacgcacu

SEQ ID NO: 2094 - RNA, 22 nt, Artificial Sequence
  Synthesized RNAi sequence
uuguacauaagugguaugaggu

SEQ ID NO: 2095 - RNA, 22 nt, Artificial Sequence
  Synthesized RNAi sequence
uuguagguuaccuguaaaaccc

SEQ ID NO: 2096 - RNA, 22 nt, Artificial Sequence
  Synthesized RNAi sequence
uugucacuacaaggcugugcau

SEQ ID NO: 2097 - RNA, 22 nt, Artificial Sequence
  Synthesized RNAi sequence
uugucagaauguguggcauaag

SEQ ID NO: 2098 - RNA, 22 nt, Artificial Sequence
  Synthesized RNAi sequence
uugucugcuaauaaugcagcuu

SEQ ID NO: 2099 - RNA, 22 nt, Artificial Sequence
  Synthesized RNAi sequence
uuguugaacaucaaucauaaac

SEQ ID NO: 2100 - RNA, 22 nt, Artificial Sequence
  Synthesized RNAi sequence
uuguuuguaaacccacaagcua

SEQ ID NO: 2101 - RNA, 22 nt, Artificial Sequence
  Synthesized RNAi sequence
uuguuuuccaugagacucacau

SEQ ID NO: 2102 - RNA, 22 nt, Artificial Sequence
  Synthesized RNAi sequence
uuuaaaacccaucauagagaug

SEQ ID NO: 2103 - RNA, 22 nt, Artificial Sequence
  Synthesized RNAi sequence
uuuaaauuaacaaaagcacuuu

SEQ ID NO: 2104 - RNA, 22 nt, Artificial Sequence
  Synthesized RNAi sequence
uuuaaauugaucuccaggcggu

SEQ ID NO: 2105 - RNA, 22 nt, Artificial Sequence
  Synthesized RNAi sequence
uuuaacaaccauguguugaacc

SEQ ID NO: 2106 - RNA, 22 nt, Artificial Sequence
  Synthesized RNAi sequence
uuuacaacauuaaaagccacau

SEQ ID NO: 2107 - RNA, 22 nt, Artificial Sequence
  Synthesized RNAi sequence
uuuacauacaaacugccaccau

SEQ ID NO: 2108 - RNA, 22 nt, Artificial Sequence
  Synthesized RNAi sequence
uuuaggguuaccaaugucguga

SEQ ID NO: 2109 - RNA, 22 nt, Artificial Sequence
  Synthesized RNAi sequence
uuuagugguacauaaucuauau

SEQ ID NO: 2110 - RNA, 22 nt, Artificial Sequence
  Synthesized RNAi sequence
uuuagugucaacacugaggugu

SEQ ID NO: 2111 - RNA, 22 nt, Artificial Sequence
  Synthesized RNAi sequence
uuuauaagcuuugucacuacaa

SEQ ID NO: 2112 - RNA, 22 nt, Artificial Sequence
  Synthesized RNAi sequence
uuuauacgcacuacauuccaag

SEQ ID NO: 2113 - RNA, 22 nt, Artificial Sequence
  Synthesized RNAi sequence
uuuaucaaaagcuggugugugg

SEQ ID NO: 2114 - RNA, 22 nt, Artificial Sequence
  Synthesized RNAi sequence
uuuauuuacauacaaacugcca

SEQ ID NO: 2115 - RNA, 22 nt, Artificial Sequence
  Synthesized RNAi sequence
uuucacaaaauacuucauagau

SEQ ID NO: 2116 - RNA, 22 nt, Artificial Sequence
  Synthesized RNAi sequence
uuucuaaacucugaagucuugu

SEQ ID NO: 2117 - RNA, 22 nt, Artificial Sequence
  Synthesized RNAi sequence
uuucuacaagccgcauuaaucu

SEQ ID NO: 2118 - RNA, 22 nt, Artificial Sequence
  Synthesized RNAi sequence
uuugaauuuagugucaacacug

SEQ ID NO: 2119 - RNA, 22 nt, Artificial Sequence
  Synthesized RNAi sequence
uuuguaaacccacaagcuaaag

SEQ ID NO: 2120 - RNA, 22 nt, Artificial Sequence
  Synthesized RNAi sequence
uuuguacaaucuuuauacgcac

SEQ ID NO: 2121 - RNA, 22 nt, Artificial Sequence
  Synthesized RNAi sequence
uuuguacauaagugguaugagg

SEQ ID NO: 2122 - RNA, 22 nt, Artificial Sequence
  Synthesized RNAi sequence
uuuguagguuaccuguaaaacc

SEQ ID NO: 2123 - RNA, 22 nt, Artificial Sequence
  Synthesized RNAi sequence
uuugucacuacaaggcugugca

SEQ ID NO: 2124 - RNA, 22 nt, Artificial Sequence
  Synthesized RNAi sequence
uuugucagaauguguggcauaa

SEQ ID NO: 2125 - RNA, 22 nt, Artificial Sequence
  Synthesized RNAi sequence
uuugucugcuaauaaugcagcu

SEQ ID NO: 2126 - RNA, 22 nt, Artificial Sequence
  Synthesized RNAi sequence
uuuuaaaacccaucauagagau

SEQ ID NO: 2127 - RNA, 22 nt, Artificial Sequence
  Synthesized RNAi sequence
uuuuauaagcuuugucacuaca

SEQ ID NO: 2128 - RNA, 22 nt, Artificial Sequence
  Synthesized RNAi sequence
uuuuaucaaaagcuggugugug

SEQ ID NO: 2129 - RNA, 22 nt, Artificial Sequence
  Synthesized RNAi sequence
uuuucacaaaauacuucauaga

SEQ ID NO: 2130 - RNA, 22 nt, Artificial Sequence
  Synthesized RNAi sequence
uuuuccaugagacucacaugga

SEQ ID NO: 2131 - RNA, 22 nt, Artificial Sequence
  Synthesized RNAi sequence
uuuucuaaacucugaagucuug

SEQ ID NO: 2132 - RNA, 22 nt, Artificial Sequence
  Synthesized RNAi sequence
uuuugaauuuagugucaacacu

SEQ ID NO: 2133 - RNA, 22 nt, Artificial Sequence
  Synthesized RNAi sequence
aaacaccagauggugaaccauu

SEQ ID NO: 2134 - RNA, 22 nt, Artificial Sequence
  Synthesized RNAi sequence
aaacauuaacuguaauaguugu

SEQ ID NO: 2135 - RNA, 22 nt, Artificial Sequence
  Synthesized RNAi sequence
aaaccaacacuaccacaugaac

SEQ ID NO: 2136 - RNA, 22 nt, Artificial Sequence
  Synthesized RNAi sequence
aaaccaccugucuccauuuaua

SEQ ID NO: 2137 - RNA, 22 nt, Artificial Sequence
  Synthesized RNAi sequence
aaacggcaauuccaguuugagc

SEQ ID NO: 2138 - RNA, 22 nt, Artificial Sequence
  Synthesized RNAi sequence
aaacuacgucaucaagccaaag

SEQ ID NO: 2139 - RNA, 22 nt, Artificial Sequence
  Synthesized RNAi sequence
aaacuuauacuuaggugucuua

SEQ ID NO: 2140 - RNA, 22 nt, Artificial Sequence
  Synthesized RNAi sequence
aaagaccguuaaguguaguugu

SEQ ID NO: 2141 - RNA, 22 nt, Artificial Sequence
  Synthesized RNAi sequence
aaagagguccuaguaugucaac

SEQ ID NO: 2142 - RNA, 22 nt, Artificial Sequence
  Synthesized RNAi sequence
aaagcacuacccaauaugguac

SEQ ID NO: 2143 - RNA, 22 nt, Artificial Sequence
  Synthesized RNAi sequence
aaagguccauaaaaguuaccuu

SEQ ID NO: 2144 - RNA, 22 nt, Artificial Sequence
  Synthesized RNAi sequence
aaagguguaaauucaucuucua

SEQ ID NO: 2145 - RNA, 22 nt, Artificial Sequence
  Synthesized RNAi sequence
aaagucauuaagaguuguggua

SEQ ID NO: 2146 - RNA, 22 nt, Artificial Sequence
  Synthesized RNAi sequence
aaaguuaccuucuaagucugug

SEQ ID NO: 2147 - RNA, 22 nt, Artificial Sequence
  Synthesized RNAi sequence
aaaucgauugagaaaccaccug

SEQ ID NO: 2148 - RNA, 22 nt, Artificial Sequence
  Synthesized RNAi sequence
aaaucuucauaauuaggguuaa

SEQ ID NO: 2149 - RNA, 22 nt, Artificial Sequence
  Synthesized RNAi sequence
aaauuaugauuagacuuacgaa

SEQ ID NO: 2150 - RNA, 22 nt, Artificial Sequence
  Synthesized RNAi sequence
aaauucaucuucuaauaaagca

SEQ ID NO: 2151 - RNA, 22 nt, Artificial Sequence
  Synthesized RNAi sequence
aaauugggccucauagcacauu

SEQ ID NO: 2152 - RNA, 22 nt, Artificial Sequence
  Synthesized RNAi sequence
aacaaaagguccauaaaaguua

SEQ ID NO: 2153 - RNA, 22 nt, Artificial Sequence
  Synthesized RNAi sequence
aacaaacuuauacuuagguguc

SEQ ID NO: 2154 - RNA, 22 nt, Artificial Sequence
  Synthesized RNAi sequence
aacaacaucaaaagguguaaau

SEQ ID NO: 2155 - RNA, 22 nt, Artificial Sequence
  Synthesized RNAi sequence
aacaccagauggugaaccauug

SEQ ID NO: 2156 - RNA, 22 nt, Artificial Sequence
  Synthesized RNAi sequence
aacaccugagcauugucuaaca

SEQ ID NO: 2157 - RNA, 22 nt, Artificial Sequence
  Synthesized RNAi sequence
aacacuaccacaugaaccauua

SEQ ID NO: 2158 - RNA, 22 nt, Artificial Sequence
  Synthesized RNAi sequence
aacagcagcguacaaccaagcu

SEQ ID NO: 2159 - RNA, 22 nt, Artificial Sequence
  Synthesized RNAi sequence
aacaucaaaagguguaaauuca

SEQ ID NO: 2160 - RNA, 22 nt, Artificial Sequence
  Synthesized RNAi sequence
aacauggucuuguguuagaggu

SEQ ID NO: 2161 - RNA, 22 nt, Artificial Sequence
  Synthesized RNAi sequence
aacauuaacuguaauaguugug

SEQ ID NO: 2162 - RNA, 22 nt, Artificial Sequence
  Synthesized RNAi sequence
aaccaacacuaccacaugaacc

SEQ ID NO: 2163 - RNA, 22 nt, Artificial Sequence
  Synthesized RNAi sequence
aaccaccugucuccauuuauaa

SEQ ID NO: 2164 - RNA, 22 nt, Artificial Sequence
  Synthesized RNAi sequence
aaccauuaaggaaugaacccuu

SEQ ID NO: 2165 - RNA, 22 nt, Artificial Sequence
  Synthesized RNAi sequence
aacccugaguugaacauuacca

SEQ ID NO: 2166 - RNA, 22 nt, Artificial Sequence
  Synthesized RNAi sequence
aacccuuaauagugaaauuggg

SEQ ID NO: 2167 - RNA, 22 nt, Artificial Sequence
  Synthesized RNAi sequence
aaccuuaagcuuaaguacacaa

SEQ ID NO: 2168 - RNA, 22 nt, Artificial Sequence
  Synthesized RNAi sequence
aacggcaauuccaguuugagca

SEQ ID NO: 2169 - RNA, 22 nt, Artificial Sequence
  Synthesized RNAi sequence
aacuacgucaucaagccaaaga

SEQ ID NO: 2170 - RNA, 22 nt, Artificial Sequence
  Synthesized RNAi sequence
aacuccaguugguaauuccaua

SEQ ID NO: 2171 - RNA, 22 nt, Artificial Sequence
  Synthesized RNAi sequence
aacuguaauaguuguguccgua

SEQ ID NO: 2172 - RNA, 22 nt, Artificial Sequence
  Synthesized RNAi sequence
aacuuauacuuaggugucuuag

SEQ ID NO: 2173 - RNA, 22 nt, Artificial Sequence
  Synthesized RNAi sequence
aagaaauuaugauuagacuuac

SEQ ID NO: 2174 - RNA, 22 nt, Artificial Sequence
  Synthesized RNAi sequence
aagaccguuaaguguaguugua

SEQ ID NO: 2175 - RNA, 22 nt, Artificial Sequence
  Synthesized RNAi sequence
aagagguccuaguaugucaaca

SEQ ID NO: 2176 - RNA, 22 nt, Artificial Sequence
  Synthesized RNAi sequence
aagaguugugguaaaucgauug

SEQ ID NO: 2177 - RNA, 22 nt, Artificial Sequence
  Synthesized RNAi sequence
aagcacacauaucuaaaacggc

SEQ ID NO: 2178 - RNA, 22 nt, Artificial Sequence
  Synthesized RNAi sequence
aagcacuacccaauaugguacg

SEQ ID NO: 2179 - RNA, 22 nt, Artificial Sequence
  Synthesized RNAi sequence
aagccaaagaccguuaagugua

SEQ ID NO: 2180 - RNA, 22 nt, Artificial Sequence
  Synthesized RNAi sequence
aagcuaaaacauuaacuguaau

SEQ ID NO: 2181 - RNA, 22 nt, Artificial Sequence
  Synthesized RNAi sequence
aagcuuaaguacacaauuuugc

SEQ ID NO: 2182 - RNA, 22 nt, Artificial Sequence
  Synthesized RNAi sequence
aaggaaugaacccuuaauagug

SEQ ID NO: 2183 - RNA, 22 nt, Artificial Sequence
  Synthesized RNAi sequence
aagguccauaaaaguuaccuuc

SEQ ID NO: 2184 - RNA, 22 nt, Artificial Sequence
  Synthesized RNAi sequence
aagguguaaauucaucuucuaa

SEQ ID NO: 2185 - RNA, 22 nt, Artificial Sequence
  Synthesized RNAi sequence
aaguaacaccugagcauugucu

SEQ ID NO: 2186 - RNA, 22 nt, Artificial Sequence
  Synthesized RNAi sequence
aaguacacaauuuugcauagaa

SEQ ID NO: 2187 - RNA, 22 nt, Artificial Sequence
  Synthesized RNAi sequence
aagucauuaagaguugugguaa

SEQ ID NO: 2188 - RNA, 22 nt, Artificial Sequence
  Synthesized RNAi sequence
aagucugugccagcaugaacuc

SEQ ID NO: 2189 - RNA, 22 nt, Artificial Sequence
  Synthesized RNAi sequence
aaguguaguuguaccacaaguu

SEQ ID NO: 2190 - RNA, 22 nt, Artificial Sequence
  Synthesized RNAi sequence
aaguuaccuucuaagucugugc

SEQ ID NO: 2191 - RNA, 22 nt, Artificial Sequence
  Synthesized RNAi sequence
aaguuacuuguaccauacaacc

SEQ ID NO: 2192 - RNA, 22 nt, Artificial Sequence
  Synthesized RNAi sequence
aauaaagcacuacccaauaugg

SEQ ID NO: 2193 - RNA, 22 nt, Artificial Sequence
  Synthesized RNAi sequence
aauagugaaauugggccucaua

SEQ ID NO: 2194 - RNA, 22 nt, Artificial Sequence
  Synthesized RNAi sequence
aauaguuguguccguaccagcu

SEQ ID NO: 2195 - RNA, 22 nt, Artificial Sequence
  Synthesized RNAi sequence
aauaugguacguccauucauac

SEQ ID NO: 2196 - RNA, 22 nt, Artificial Sequence
  Synthesized RNAi sequence
aaucgauugagaaaccaccugu

SEQ ID NO: 2197 - RNA, 22 nt, Artificial Sequence
  Synthesized RNAi sequence
aaucuauguuaaaaccaacacu

SEQ ID NO: 2198 - RNA, 22 nt, Artificial Sequence
  Synthesized RNAi sequence
aaucuucauaauuaggguuaag

SEQ ID NO: 2199 - RNA, 22 nt, Artificial Sequence
  Synthesized RNAi sequence
aaugaacccuuaauagugaaau

SEQ ID NO: 2200 - RNA, 22 nt, Artificial Sequence
  Synthesized RNAi sequence
aaugaguaaaucuucauaauua

SEQ ID NO: 2201 - RNA, 22 nt, Artificial Sequence
  Synthesized RNAi sequence
aaugcgaacaaacuuauacuua

SEQ ID NO: 2202 - RNA, 22 nt, Artificial Sequence
  Synthesized RNAi sequence
aauuaggguuaagcaugucuuc

SEQ ID NO: 2203 - RNA, 22 nt, Artificial Sequence
  Synthesized RNAi sequence
aauuaugauuagacuuacgaau

SEQ ID NO: 2204 - RNA, 22 nt, Artificial Sequence
  Synthesized RNAi sequence
aauucaucuucuaauaaagcac

SEQ ID NO: 2205 - RNA, 22 nt, Artificial Sequence
  Synthesized RNAi sequence
aauuccaguuugagcagaaaga

SEQ ID NO: 2206 - RNA, 22 nt, Artificial Sequence
  Synthesized RNAi sequence
aauucuuuuaaugaagcacaca

SEQ ID NO: 2207 - RNA, 22 nt, Artificial Sequence
  Synthesized RNAi sequence
aauugggccucauagcacauug

SEQ ID NO: 2208 - RNA, 22 nt, Artificial Sequence
  Synthesized RNAi sequence
aauuguacuucauagccacaag

SEQ ID NO: 2209 - RNA, 22 nt, Artificial Sequence
  Synthesized RNAi sequence
acaaaagguccauaaaaguuac

SEQ ID NO: 2210 - RNA, 22 nt, Artificial Sequence
  Synthesized RNAi sequence
acaaacuuauacuuaggugucu

SEQ ID NO: 2211 - RNA, 22 nt, Artificial Sequence
  Synthesized RNAi sequence
acaacaucaaaagguguaaauu

SEQ ID NO: 2212 - RNA, 22 nt, Artificial Sequence
  Synthesized RNAi sequence
acaaccaagcuaaaacauuaac

SEQ ID NO: 2213 - RNA, 22 nt, Artificial Sequence
  Synthesized RNAi sequence
acaacccucaacuuuaccagau

SEQ ID NO: 2214 - RNA, 22 nt, Artificial Sequence
  Synthesized RNAi sequence
acaagguuaaagucauuaagag

SEQ ID NO: 2215 - RNA, 22 nt, Artificial Sequence
  Synthesized RNAi sequence
acaaguuacuuguaccauacaa

SEQ ID NO: 2216 - RNA, 22 nt, Artificial Sequence
  Synthesized RNAi sequence
acaauuuugcauagaaugucca

SEQ ID NO: 2217 - RNA, 22 nt, Artificial Sequence
  Synthesized RNAi sequence
acacaauuuugcauagaauguc

SEQ ID NO: 2218 - RNA, 22 nt, Artificial Sequence
  Synthesized RNAi sequence
acacauaucuaaaacggcaauu

SEQ ID NO: 2219 - RNA, 22 nt, Artificial Sequence
  Synthesized RNAi sequence
acaccagauggugaaccauugu

SEQ ID NO: 2220 - RNA, 22 nt, Artificial Sequence
  Synthesized RNAi sequence
acaccugagcauugucuaacaa

SEQ ID NO: 2221 - RNA, 22 nt, Artificial Sequence
  Synthesized RNAi sequence
acacuaccacaugaaccauuaa

SEQ ID NO: 2222 - RNA, 22 nt, Artificial Sequence
  Synthesized RNAi sequence
acagcagcguacaaccaagcua

SEQ ID NO: 2223 - RNA, 22 nt, Artificial Sequence
  Synthesized RNAi sequence
acaguaaacuacgucaucaagc

SEQ ID NO: 2224 - RNA, 22 nt, Artificial Sequence
  Synthesized RNAi sequence
acauaucuaaaacggcaauucc

SEQ ID NO: 2225 - RNA, 22 nt, Artificial Sequence
  Synthesized RNAi sequence
acaucaaaagguguaaauucau

SEQ ID NO: 2226 - RNA, 22 nt, Artificial Sequence
  Synthesized RNAi sequence
acaugaaccauuaaggaaugaa

SEQ ID NO: 2227 - RNA, 22 nt, Artificial Sequence
  Synthesized RNAi sequence
acauggucuuguguuagagguu

SEQ ID NO: 2228 - RNA, 22 nt, Artificial Sequence
  Synthesized RNAi sequence
acaugucuuggacaguaaacua

SEQ ID NO: 2229 - RNA, 22 nt, Artificial Sequence
  Synthesized RNAi sequence
acauuaacuguaauaguugugu

SEQ ID NO: 2230 - RNA, 22 nt, Artificial Sequence
  Synthesized RNAi sequence
acauugguaaacaccagauggu

SEQ ID NO: 2231 - RNA, 22 nt, Artificial Sequence
  Synthesized RNAi sequence
accaacacuaccacaugaacca

SEQ ID NO: 2232 - RNA, 22 nt, Artificial Sequence
  Synthesized RNAi sequence
accaagaaauuaugauuagacu

SEQ ID NO: 2233 - RNA, 22 nt, Artificial Sequence
  Synthesized RNAi sequence
accaagcuaaaacauuaacugu

SEQ ID NO: 2234 - RNA, 22 nt, Artificial Sequence
  Synthesized RNAi sequence
accacaaguuacuuguaccaua

SEQ ID NO: 2235 - RNA, 22 nt, Artificial Sequence
  Synthesized RNAi sequence
accacaugaaccauuaaggaau

SEQ ID NO: 2236 - RNA, 22 nt, Artificial Sequence
  Synthesized RNAi sequence
accaccugucuccauuuauaac

SEQ ID NO: 2237 - RNA, 22 nt, Artificial Sequence
  Synthesized RNAi sequence
accagauggugaaccauuguaa

SEQ ID NO: 2238 - RNA, 22 nt, Artificial Sequence
  Synthesized RNAi sequence
accagccuguaccaagaaauua

SEQ ID NO: 2239 - RNA, 22 nt, Artificial Sequence
  Synthesized RNAi sequence
accauacaacccucaacuuuac

SEQ ID NO: 2240 - RNA, 22 nt, Artificial Sequence
  Synthesized RNAi sequence
accauuaaggaaugaacccuua

SEQ ID NO: 2241 - RNA, 22 nt, Artificial Sequence
  Synthesized RNAi sequence
acccaauaugguacguccauuc

SEQ ID NO: 2242 - RNA, 22 nt, Artificial Sequence
  Synthesized RNAi sequence
acccugaguugaacauuaccag

SEQ ID NO: 2243 - RNA, 22 nt, Artificial Sequence
  Synthesized RNAi sequence
acccuuaauagugaaauugggc

SEQ ID NO: 2244 - RNA, 22 nt, Artificial Sequence
  Synthesized RNAi sequence
acccuugauuguucuuuucacu

SEQ ID NO: 2245 - RNA, 22 nt, Artificial Sequence
  Synthesized RNAi sequence
accguuaaguguaguuguacca

SEQ ID NO: 2246 - RNA, 22 nt, Artificial Sequence
  Synthesized RNAi sequence
accugagcauugucuaacaaca

SEQ ID NO: 2247 - RNA, 22 nt, Artificial Sequence
  Synthesized RNAi sequence
accugucuccauuuauaacagc

SEQ ID NO: 2248 - RNA, 22 nt, Artificial Sequence
  Synthesized RNAi sequence
accuucuaagucugugccagca

SEQ ID NO: 2249 - RNA, 22 nt, Artificial Sequence
  Synthesized RNAi sequence
acggcaauuccaguuugagcag

SEQ ID NO: 2250 - RNA, 22 nt, Artificial Sequence
  Synthesized RNAi sequence
acgucaucaagccaaagaccgu

SEQ ID NO: 2251 - RNA, 22 nt, Artificial Sequence
  Synthesized RNAi sequence
acguccauucauaccauuuugc

SEQ ID NO: 2252 - RNA, 22 nt, Artificial Sequence
  Synthesized RNAi sequence
acuaccacaugaaccauuaagg

SEQ ID NO: 2253 - RNA, 22 nt, Artificial Sequence
  Synthesized RNAi sequence
acuacccaauaugguacgucca

SEQ ID NO: 2254 - RNA, 22 nt, Artificial Sequence
  Synthesized RNAi sequence
acuacgucaucaagccaaagac

SEQ ID NO: 2255 - RNA, 22 nt, Artificial Sequence
  Synthesized RNAi sequence
acuccaguugguaauuccauau

SEQ ID NO: 2256 - RNA, 22 nt, Artificial Sequence
  Synthesized RNAi sequence
acuguaauaguuguguccguac

SEQ ID NO: 2257 - RNA, 22 nt, Artificial Sequence
  Synthesized RNAi sequence
acuuacgaaugaguaaaucuuc

SEQ ID NO: 2258 - RNA, 22 nt, Artificial Sequence
  Synthesized RNAi sequence
acuuaggugucuuaggauuggc

SEQ ID NO: 2259 - RNA, 22 nt, Artificial Sequence
  Synthesized RNAi sequence
acuuauacuuaggugucuuagg

SEQ ID NO: 2260 - RNA, 22 nt, Artificial Sequence
  Synthesized RNAi sequence
acuucauagccacaagguuaaa

SEQ ID NO: 2261 - RNA, 22 nt, Artificial Sequence
  Synthesized RNAi sequence
acuuuggaaaguaacaccugag

SEQ ID NO: 2262 - RNA, 22 nt, Artificial Sequence
  Synthesized RNAi sequence
agaaaccaccugucuccauuua

SEQ ID NO: 2263 - RNA, 22 nt, Artificial Sequence
  Synthesized RNAi sequence
agaaagagguccuaguauguca

SEQ ID NO: 2264 - RNA, 22 nt, Artificial Sequence
  Synthesized RNAi sequence
agaaauuaugauuagacuuacg

SEQ ID NO: 2265 - RNA, 22 nt, Artificial Sequence
  Synthesized RNAi sequence
agaauguccaauaacccugagu

SEQ ID NO: 2266 - RNA, 22 nt, Artificial Sequence
  Synthesized RNAi sequence
agaccguuaaguguaguuguac

SEQ ID NO: 2267 - RNA, 22 nt, Artificial Sequence
  Synthesized RNAi sequence
agacuuacgaaugaguaaaucu

SEQ ID NO: 2268 - RNA, 22 nt, Artificial Sequence
  Synthesized RNAi sequence
agagguccuaguaugucaacau

SEQ ID NO: 2269 - RNA, 22 nt, Artificial Sequence
  Synthesized RNAi sequence
agaggugcagaucacaugucuu

SEQ ID NO: 2270 - RNA, 22 nt, Artificial Sequence
  Synthesized RNAi sequence
agagguucauaauuguacuuca

SEQ ID NO: 2271 - RNA, 22 nt, Artificial Sequence
  Synthesized RNAi sequence
agaguugugguaaaucgauuga

SEQ ID NO: 2272 - RNA, 22 nt, Artificial Sequence
  Synthesized RNAi sequence
agaucacaugucuuggacagua

SEQ ID NO: 2273 - RNA, 22 nt, Artificial Sequence
  Synthesized RNAi sequence
agcacuacccaauaugguacgu

SEQ ID NO: 2274 - RNA, 22 nt, Artificial Sequence
  Synthesized RNAi sequence
agcagaaagagguccuaguaug

SEQ ID NO: 2275 - RNA, 22 nt, Artificial Sequence
  Synthesized RNAi sequence
agcagcguacaaccaagcuaaa

SEQ ID NO: 2276 - RNA, 22 nt, Artificial Sequence
  Synthesized RNAi sequence
agcaugaacuccaguugguaau

SEQ ID NO: 2277 - RNA, 22 nt, Artificial Sequence
  Synthesized RNAi sequence
agcaugucuucagaggugcaga

SEQ ID NO: 2278 - RNA, 22 nt, Artificial Sequence
  Synthesized RNAi sequence
agcauugucuaacaacaucaaa

SEQ ID NO: 2279 - RNA, 22 nt, Artificial Sequence
  Synthesized RNAi sequence
agccaaagaccguuaaguguag

SEQ ID NO: 2280 - RNA, 22 nt, Artificial Sequence
  Synthesized RNAi sequence
agccacaagguuaaagucauua

SEQ ID NO: 2281 - RNA, 22 nt, Artificial Sequence
  Synthesized RNAi sequence
agccuguaccaagaaauuauga

SEQ ID NO: 2282 - RNA, 22 nt, Artificial Sequence
  Synthesized RNAi sequence
agcguacaaccaagcuaaaaca

SEQ ID NO: 2283 - RNA, 22 nt, Artificial Sequence
  Synthesized RNAi sequence
agcuaaaacauuaacuguaaua

SEQ ID NO: 2284 - RNA, 22 nt, Artificial Sequence
  Synthesized RNAi sequence
agcugcuugugcuguuugccug

SEQ ID NO: 2285 - RNA, 22 nt, Artificial Sequence
  Synthesized RNAi sequence
agcuuaaguacacaauuuugca

SEQ ID NO: 2286 - RNA, 22 nt, Artificial Sequence
  Synthesized RNAi sequence
aggaaugaacccuuaauaguga

SEQ ID NO: 2287 - RNA, 22 nt, Artificial Sequence
  Synthesized RNAi sequence
aggauuggcuguaucaaccuua

SEQ ID NO: 2288 - RNA, 22 nt, Artificial Sequence
  Synthesized RNAi sequence
aggguuaagcaugucuucagag

SEQ ID NO: 2289 - RNA, 22 nt, Artificial Sequence
  Synthesized RNAi sequence
agguccauaaaaguuaccuucu

SEQ ID NO: 2290 - RNA, 22 nt, Artificial Sequence
  Synthesized RNAi sequence
agguccuaguaugucaacaugg

SEQ ID NO: 2291 - RNA, 22 nt, Artificial Sequence
  Synthesized RNAi sequence
aggugcagaucacaugucuugg

SEQ ID NO: 2292 - RNA, 22 nt, Artificial Sequence
  Synthesized RNAi sequence
agguguaaauucaucuucuaau

SEQ ID NO: 2293 - RNA, 22 nt, Artificial Sequence
  Synthesized RNAi sequence
agguuaaagucauuaagaguug

SEQ ID NO: 2294 - RNA, 22 nt, Artificial Sequence
  Synthesized RNAi sequence
agguucauaauuguacuucaua

SEQ ID NO: 2295 - RNA, 22 nt, Artificial Sequence
  Synthesized RNAi sequence
aguaaacuacgucaucaagcca

SEQ ID NO: 2296 - RNA, 22 nt, Artificial Sequence
  Synthesized RNAi sequence
aguaaaucuucauaauuagggu

SEQ ID NO: 2297 - RNA, 22 nt, Artificial Sequence
  Synthesized RNAi sequence
aguaacaccugagcauugucua

SEQ ID NO: 2298 - RNA, 22 nt, Artificial Sequence
  Synthesized RNAi sequence
aguaauucuuuuaaugaagcac

SEQ ID NO: 2299 - RNA, 22 nt, Artificial Sequence
  Synthesized RNAi sequence
aguacacaauuuugcauagaau

SEQ ID NO: 2300 - RNA, 22 nt, Artificial Sequence
  Synthesized RNAi sequence
aguaugucaacauggucuugug

SEQ ID NO: 2301 - RNA, 22 nt, Artificial Sequence
  Synthesized RNAi sequence
agucauuaagaguugugguaaa

SEQ ID NO: 2302 - RNA, 22 nt, Artificial Sequence
  Synthesized RNAi sequence
agucugugccagcaugaacucc

SEQ ID NO: 2303 - RNA, 22 nt, Artificial Sequence
  Synthesized RNAi sequence
agugaaauugggccucauagca

SEQ ID NO: 2304 - RNA, 22 nt, Artificial Sequence
  Synthesized RNAi sequence
aguguaguuguaccacaaguua

SEQ ID NO: 2305 - RNA, 22 nt, Artificial Sequence
  Synthesized RNAi sequence
aguuaccuucuaagucugugcc

SEQ ID NO: 2306 - RNA, 22 nt, Artificial Sequence
  Synthesized RNAi sequence
aguuacuuguaccauacaaccc

SEQ ID NO: 2307 - RNA, 22 nt, Artificial Sequence
  Synthesized RNAi sequence
aguugaacauuaccagccugua

SEQ ID NO: 2308 - RNA, 22 nt, Artificial Sequence
  Synthesized RNAi sequence
aguuguaccacaaguuacuugu

SEQ ID NO: 2309 - RNA, 22 nt, Artificial Sequence
  Synthesized RNAi sequence
aguugugguaaaucgauugaga

SEQ ID NO: 2310 - RNA, 22 nt, Artificial Sequence
  Synthesized RNAi sequence
aguuguguccguaccagcugcu

SEQ ID NO: 2311 - RNA, 22 nt, Artificial Sequence
  Synthesized RNAi sequence
aguuugagcagaaagagguccu

SEQ ID NO: 2312 - RNA, 22 nt, Artificial Sequence
  Synthesized RNAi sequence
auaaaaguuaccuucuaagucu

SEQ ID NO: 2313 - RNA, 22 nt, Artificial Sequence
  Synthesized RNAi sequence
auaaagcacuacccaauauggu

SEQ ID NO: 2314 - RNA, 22 nt, Artificial Sequence
  Synthesized RNAi sequence
auaacagcagcguacaaccaag

SEQ ID NO: 2315 - RNA, 22 nt, Artificial Sequence
  Synthesized RNAi sequence
auaacccugaguugaacauuac

SEQ ID NO: 2316 - RNA, 22 nt, Artificial Sequence
  Synthesized RNAi sequence
auaaucuauguuaaaaccaaca

SEQ ID NO: 2317 - RNA, 22 nt, Artificial Sequence
  Synthesized RNAi sequence
auaauuaggguuaagcaugucu

SEQ ID NO: 2318 - RNA, 22 nt, Artificial Sequence
  Synthesized RNAi sequence
auaauuguacuucauagccaca

SEQ ID NO: 2319 - RNA, 22 nt, Artificial Sequence
  Synthesized RNAi sequence
auacaacccucaacuuuaccag

SEQ ID NO: 2320 - RNA, 22 nt, Artificial Sequence
  Synthesized RNAi sequence
auacuuaggugucuuaggauug

SEQ ID NO: 2321 - RNA, 22 nt, Artificial Sequence
  Synthesized RNAi sequence
auagaauguccaauaacccuga

SEQ ID NO: 2322 - RNA, 22 nt, Artificial Sequence
  Synthesized RNAi sequence
auagcacauugguaaacaccag

SEQ ID NO: 2323 - RNA, 22 nt, Artificial Sequence
  Synthesized RNAi sequence
auagccacaagguuaaagucau

SEQ ID NO: 2324 - RNA, 22 nt, Artificial Sequence
  Synthesized RNAi sequence
auagugaaauugggccucauag

SEQ ID NO: 2325 - RNA, 22 nt, Artificial Sequence
  Synthesized RNAi sequence
auaguuguguccguaccagcug

SEQ ID NO: 2326 - RNA, 22 nt, Artificial Sequence
  Synthesized RNAi sequence
auaucuaaaacggcaauuccag

SEQ ID NO: 2327 - RNA, 22 nt, Artificial Sequence
  Synthesized RNAi sequence
auaugguacguccauucauacc

SEQ ID NO: 2328 - RNA, 22 nt, Artificial Sequence
  Synthesized RNAi sequence
aucaaaagguguaaauucaucu

SEQ ID NO: 2329 - RNA, 22 nt, Artificial Sequence
  Synthesized RNAi sequence
aucaaccuuaagcuuaaguaca

SEQ ID NO: 2330 - RNA, 22 nt, Artificial Sequence
  Synthesized RNAi sequence
aucaagccaaagaccguuaagu

SEQ ID NO: 2331 - RNA, 22 nt, Artificial Sequence
  Synthesized RNAi sequence
aucacaugucuuggacaguaaa

SEQ ID NO: 2332 - RNA, 22 nt, Artificial Sequence
  Synthesized RNAi sequence
aucgauugagaaaccaccuguc

SEQ ID NO: 2333 - RNA, 22 nt, Artificial Sequence
  Synthesized RNAi sequence
aucuaaaacggcaauuccaguu

SEQ ID NO: 2334 - RNA, 22 nt, Artificial Sequence
  Synthesized RNAi sequence
aucuauguuaaaaccaacacua

SEQ ID NO: 2335 - RNA, 22 nt, Artificial Sequence
  Synthesized RNAi sequence
aucuucauaauuaggguuaagc

SEQ ID NO: 2336 - RNA, 22 nt, Artificial Sequence
  Synthesized RNAi sequence
aucuucuaauaaagcacuaccc

SEQ ID NO: 2337 - RNA, 22 nt, Artificial Sequence
  Synthesized RNAi sequence
augaaccauuaaggaaugaacc

SEQ ID NO: 2338 - RNA, 22 nt, Artificial Sequence
  Synthesized RNAi sequence
augaacccuuaauagugaaauu

SEQ ID NO: 2339 - RNA, 22 nt, Artificial Sequence
  Synthesized RNAi sequence
augaacuccaguugguaauucc

SEQ ID NO: 2340 - RNA, 22 nt, Artificial Sequence
  Synthesized RNAi sequence
augaagcacacauaucuaaaac

SEQ ID NO: 2341 - RNA, 22 nt, Artificial Sequence
  Synthesized RNAi sequence
augaguaaaucuucauaauuag

SEQ ID NO: 2342 - RNA, 22 nt, Artificial Sequence
  Synthesized RNAi sequence
augauuagacuuacgaaugagu

SEQ ID NO: 2343 - RNA, 22 nt, Artificial Sequence
  Synthesized RNAi sequence
augcgaacaaacuuauacuuag

SEQ ID NO: 2344 - RNA, 22 nt, Artificial Sequence
  Synthesized RNAi sequence
augguacguccauucauaccau

SEQ ID NO: 2345 - RNA, 22 nt, Artificial Sequence
  Synthesized RNAi sequence
auggucuuguguuagagguuca

SEQ ID NO: 2346 - RNA, 22 nt, Artificial Sequence
  Synthesized RNAi sequence
augucaacauggucuuguguua

SEQ ID NO: 2347 - RNA, 22 nt, Artificial Sequence
  Synthesized RNAi sequence
auguccaauaacccugaguuga

SEQ ID NO: 2348 - RNA, 22 nt, Artificial Sequence
  Synthesized RNAi sequence
augucuucagaggugcagauca

SEQ ID NO: 2349 - RNA, 22 nt, Artificial Sequence
  Synthesized RNAi sequence
augucuuggacaguaaacuacg

SEQ ID NO: 2350 - RNA, 22 nt, Artificial Sequence
  Synthesized RNAi sequence
auguuaaaaccaacacuaccac

SEQ ID NO: 2351 - RNA, 22 nt, Artificial Sequence
  Synthesized RNAi sequence
auuaacuguaauaguugugucc

SEQ ID NO: 2352 - RNA, 22 nt, Artificial Sequence
  Synthesized RNAi sequence
auuaagaguugugguaaaucga

SEQ ID NO: 2353 - RNA, 22 nt, Artificial Sequence
  Synthesized RNAi sequence
auuaaggaaugaacccuuaaua

SEQ ID NO: 2354 - RNA, 22 nt, Artificial Sequence
  Synthesized RNAi sequence
auuagacuuacgaaugaguaaa

SEQ ID NO: 2355 - RNA, 22 nt, Artificial Sequence
  Synthesized RNAi sequence
auuaggguuaagcaugucuuca

SEQ ID NO: 2356 - RNA, 22 nt, Artificial Sequence
  Synthesized RNAi sequence
auucauaccauuuugcaguaau

SEQ ID NO: 2357 - RNA, 22 nt, Artificial Sequence
  Synthesized RNAi sequence
auucaucuucuaauaaagcacu

SEQ ID NO: 2358 - RNA, 22 nt, Artificial Sequence
  Synthesized RNAi sequence
auuccaguuugagcagaaagag

SEQ ID NO: 2359 - RNA, 22 nt, Artificial Sequence
  Synthesized RNAi sequence
auucuuuuaaugaagcacacau

SEQ ID NO: 2360 - RNA, 22 nt, Artificial Sequence
  Synthesized RNAi sequence
auugagaaaccaccugucucca

SEQ ID NO: 2361 - RNA, 22 nt, Artificial Sequence
  Synthesized RNAi sequence
auuggcuguaucaaccuuaagc

SEQ ID NO: 2362 - RNA, 22 nt, Artificial Sequence
  Synthesized RNAi sequence
auugggccucauagcacauugg

SEQ ID NO: 2363 - RNA, 22 nt, Artificial Sequence
  Synthesized RNAi sequence
auuguacuucauagccacaagg

SEQ ID NO: 2364 - RNA, 22 nt, Artificial Sequence
  Synthesized RNAi sequence
auugucuaacaacaucaaaagg

SEQ ID NO: 2365 - RNA, 22 nt, Artificial Sequence
  Synthesized RNAi sequence
auuguucuuuucacugcacuuu

SEQ ID NO: 2366 - RNA, 22 nt, Artificial Sequence
  Synthesized RNAi sequence
uaaaacauuaacuguaauaguu

SEQ ID NO: 2367 - RNA, 22 nt, Artificial Sequence
  Synthesized RNAi sequence
uaaaaccaacacuaccacauga

SEQ ID NO: 2368 - RNA, 22 nt, Artificial Sequence
  Synthesized RNAi sequence
uaaaacggcaauuccaguuuga

SEQ ID NO: 2369 - RNA, 22 nt, Artificial Sequence
  Synthesized RNAi sequence
uaaaaguuaccuucuaagucug

SEQ ID NO: 2370 - RNA, 22 nt, Artificial Sequence
  Synthesized RNAi sequence
uaaacaccagauggugaaccau

SEQ ID NO: 2371 - RNA, 22 nt, Artificial Sequence
  Synthesized RNAi sequence
uaaacuacgucaucaagccaaa

SEQ ID NO: 2372 - RNA, 22 nt, Artificial Sequence
  Synthesized RNAi sequence
uaaagucauuaagaguuguggu

SEQ ID NO: 2373 - RNA, 22 nt, Artificial Sequence
  Synthesized RNAi sequence
uaaaucgauugagaaaccaccu

SEQ ID NO: 2374 - RNA, 22 nt, Artificial Sequence
  Synthesized RNAi sequence
uaaaucuucauaauuaggguua

SEQ ID NO: 2375 - RNA, 22 nt, Artificial Sequence
  Synthesized RNAi sequence
uaaauucaucuucuaauaaagc

SEQ ID NO: 2376 - RNA, 22 nt, Artificial Sequence
  Synthesized RNAi sequence
uaacaacaucaaaagguguaaa

SEQ ID NO: 2377 - RNA, 22 nt, Artificial Sequence
  Synthesized RNAi sequence
uaacaccugagcauugucuaac

SEQ ID NO: 2378 - RNA, 22 nt, Artificial Sequence
  Synthesized RNAi sequence
uaacagcagcguacaaccaagc

SEQ ID NO: 2379 - RNA, 22 nt, Artificial Sequence
  Synthesized RNAi sequence
uaacccugaguugaacauuacc

SEQ ID NO: 2380 - RNA, 22 nt, Artificial Sequence
  Synthesized RNAi sequence
uaacuguaauaguuguguccgu

SEQ ID NO: 2381 - RNA, 22 nt, Artificial Sequence
  Synthesized RNAi sequence
uaagaguugugguaaaucgauu

SEQ ID NO: 2382 - RNA, 22 nt, Artificial Sequence
  Synthesized RNAi sequence
uaagcaugucuucagaggugca

SEQ ID NO: 2383 - RNA, 22 nt, Artificial Sequence
  Synthesized RNAi sequence
uaaggaaugaacccuuaauagu

SEQ ID NO: 2384 - RNA, 22 nt, Artificial Sequence
  Synthesized RNAi sequence
uaaguacacaauuuugcauaga

SEQ ID NO: 2385 - RNA, 22 nt, Artificial Sequence
  Synthesized RNAi sequence
uaagucugugccagcaugaacu

SEQ ID NO: 2386 - RNA, 22 nt, Artificial Sequence
  Synthesized RNAi sequence
uaaguguaguuguaccacaagu

SEQ ID NO: 2387 - RNA, 22 nt, Artificial Sequence
  Synthesized RNAi sequence
uaauaaagcacuacccaauaug

SEQ ID NO: 2388 - RNA, 22 nt, Artificial Sequence
  Synthesized RNAi sequence
uaauagugaaauugggccucau

SEQ ID NO: 2389 - RNA, 22 nt, Artificial Sequence
  Synthesized RNAi sequence
uaauaguuguguccguaccagc

SEQ ID NO: 2390 - RNA, 22 nt, Artificial Sequence
  Synthesized RNAi sequence
uaaucuauguuaaaaccaacac

SEQ ID NO: 2391 - RNA, 22 nt, Artificial Sequence
  Synthesized RNAi sequence
uaaugaagcacacauaucuaaa

SEQ ID NO: 2392 - RNA, 22 nt, Artificial Sequence
  Synthesized RNAi sequence
uaauuaggguuaagcaugucuu

SEQ ID NO: 2393 - RNA, 22 nt, Artificial Sequence
  Synthesized RNAi sequence
uaauucuuuuaaugaagcacac

SEQ ID NO: 2394 - RNA, 22 nt, Artificial Sequence
  Synthesized RNAi sequence
uaauuguacuucauagccacaa

SEQ ID NO: 2395 - RNA, 22 nt, Artificial Sequence
  Synthesized RNAi sequence
uacaaccaagcuaaaacauuaa

SEQ ID NO: 2396 - RNA, 22 nt, Artificial Sequence
  Synthesized RNAi sequence
uacaacccucaacuuuaccaga

SEQ ID NO: 2397 - RNA, 22 nt, Artificial Sequence
  Synthesized RNAi sequence
uacacaauuuugcauagaaugu

SEQ ID NO: 2398 - RNA, 22 nt, Artificial Sequence
  Synthesized RNAi sequence
uaccaagaaauuaugauuagac

SEQ ID NO: 2399 - RNA, 22 nt, Artificial Sequence
  Synthesized RNAi sequence
uaccacaaguuacuuguaccau

SEQ ID NO: 2400 - RNA, 22 nt, Artificial Sequence
  Synthesized RNAi sequence
uaccacaugaaccauuaaggaa

SEQ ID NO: 2401 - RNA, 22 nt, Artificial Sequence
  Synthesized RNAi sequence
uaccagccuguaccaagaaauu

SEQ ID NO: 2402 - RNA, 22 nt, Artificial Sequence
  Synthesized RNAi sequence
uaccagcugcuugugcuguuug

SEQ ID NO: 2403 - RNA, 22 nt, Artificial Sequence
  Synthesized RNAi sequence
uaccauacaacccucaacuuua

SEQ ID NO: 2404 - RNA, 22 nt, Artificial Sequence
  Synthesized RNAi sequence
uacccaauaugguacguccauu

SEQ ID NO: 2405 - RNA, 22 nt, Artificial Sequence
  Synthesized RNAi sequence
uacccuugauuguucuuuucac

SEQ ID NO: 2406 - RNA, 22 nt, Artificial Sequence
  Synthesized RNAi sequence
uaccuucuaagucugugccagc

SEQ ID NO: 2407 - RNA, 22 nt, Artificial Sequence
  Synthesized RNAi sequence
uacgucaucaagccaaagaccg

SEQ ID NO: 2408 - RNA, 22 nt, Artificial Sequence
  Synthesized RNAi sequence
uacuucauagccacaagguuaa

SEQ ID NO: 2409 - RNA, 22 nt, Artificial Sequence
  Synthesized RNAi sequence
uagaauguccaauaacccugag

SEQ ID NO: 2410 - RNA, 22 nt, Artificial Sequence
  Synthesized RNAi sequence
uagacuuacgaaugaguaaauc

SEQ ID NO: 2411 - RNA, 22 nt, Artificial Sequence
  Synthesized RNAi sequence
uagagguucauaauuguacuuc

SEQ ID NO: 2412 - RNA, 22 nt, Artificial Sequence
  Synthesized RNAi sequence
uagcacauugguaaacaccaga

SEQ ID NO: 2413 - RNA, 22 nt, Artificial Sequence
  Synthesized RNAi sequence
uagccacaagguuaaagucauu

SEQ ID NO: 2414 - RNA, 22 nt, Artificial Sequence
  Synthesized RNAi sequence
uaggauuggcuguaucaaccuu

SEQ ID NO: 2415 - RNA, 22 nt, Artificial Sequence
  Synthesized RNAi sequence
uaggguuaagcaugucuucaga

SEQ ID NO: 2416 - RNA, 22 nt, Artificial Sequence
  Synthesized RNAi sequence
uaggugucuuaggauuggcugu

SEQ ID NO: 2417 - RNA, 22 nt, Artificial Sequence
  Synthesized RNAi sequence
uaguaugucaacauggucuugu

SEQ ID NO: 2418 - RNA, 22 nt, Artificial Sequence
  Synthesized RNAi sequence
uagugaaauugggccucauagc

SEQ ID NO: 2419 - RNA, 22 nt, Artificial Sequence
  Synthesized RNAi sequence
uaguuguaccacaaguuacuug

SEQ ID NO: 2420 - RNA, 22 nt, Artificial Sequence
  Synthesized RNAi sequence
uaguuguguccguaccagcugc

SEQ ID NO: 2421 - RNA, 22 nt, Artificial Sequence
  Synthesized RNAi sequence
uauaacagcagcguacaaccaa

SEQ ID NO: 2422 - RNA, 22 nt, Artificial Sequence
  Synthesized RNAi sequence
uauacuuaggugucuuaggauu

SEQ ID NO: 2423 - RNA, 22 nt, Artificial Sequence
  Synthesized RNAi sequence
uaucaaccuuaagcuuaaguac

SEQ ID NO: 2424 - RNA, 22 nt, Artificial Sequence
  Synthesized RNAi sequence
uaucuaaaacggcaauuccagu

SEQ ID NO: 2425 - RNA, 22 nt, Artificial Sequence
  Synthesized RNAi sequence
uaugauuagacuuacgaaugag

SEQ ID NO: 2426 - RNA, 22 nt, Artificial Sequence
  Synthesized RNAi sequence
uaugguacguccauucauacca

SEQ ID NO: 2427 - RNA, 22 nt, Artificial Sequence
  Synthesized RNAi sequence
uaugucaacauggucuuguguu

SEQ ID NO: 2428 - RNA, 22 nt, Artificial Sequence
  Synthesized RNAi sequence
uauguuaaaaccaacacuacca

SEQ ID NO: 2429 - RNA, 22 nt, Artificial Sequence
  Synthesized RNAi sequence
ucaacaaaagguccauaaaagu

SEQ ID NO: 2430 - RNA, 22 nt, Artificial Sequence
  Synthesized RNAi sequence
ucaacauggucuuguguuagag

SEQ ID NO: 2431 - RNA, 22 nt, Artificial Sequence
  Synthesized RNAi sequence
ucaaccuuaagcuuaaguacac

SEQ ID NO: 2432 - RNA, 22 nt, Artificial Sequence
  Synthesized RNAi sequence
ucaagccaaagaccguuaagug

SEQ ID NO: 2433 - RNA, 22 nt, Artificial Sequence
  Synthesized RNAi sequence
ucacaugucuuggacaguaaac

SEQ ID NO: 2434 - RNA, 22 nt, Artificial Sequence
  Synthesized RNAi sequence
ucacugcacuuuggaaaguaac

SEQ ID NO: 2435 - RNA, 22 nt, Artificial Sequence
  Synthesized RNAi sequence
ucagaggugcagaucacauguc

SEQ ID NO: 2436 - RNA, 22 nt, Artificial Sequence
  Synthesized RNAi sequence
ucauaauuaggguuaagcaugu

SEQ ID NO: 2437 - RNA, 22 nt, Artificial Sequence
  Synthesized RNAi sequence
ucauaauuguacuucauagcca

SEQ ID NO: 2438 - RNA, 22 nt, Artificial Sequence
  Synthesized RNAi sequence
ucauaccauuuugcaguaauuc

SEQ ID NO: 2439 - RNA, 22 nt, Artificial Sequence
  Synthesized RNAi sequence
ucauagcacauugguaaacacc

SEQ ID NO: 2440 - RNA, 22 nt, Artificial Sequence
  Synthesized RNAi sequence
ucauagccacaagguuaaaguc

SEQ ID NO: 2441 - RNA, 22 nt, Artificial Sequence
  Synthesized RNAi sequence
ucaucaagccaaagaccguuaa

SEQ ID NO: 2442 - RNA, 22 nt, Artificial Sequence
  Synthesized RNAi sequence
ucaucuucuaauaaagcacuac

SEQ ID NO: 2443 - RNA, 22 nt, Artificial Sequence
  Synthesized RNAi sequence
uccaauaacccugaguugaaca

SEQ ID NO: 2444 - RNA, 22 nt, Artificial Sequence
  Synthesized RNAi sequence
uccaguuugagcagaaagaggu

SEQ ID NO: 2445 - RNA, 22 nt, Artificial Sequence
  Synthesized RNAi sequence
uccauaaaaguuaccuucuaag

SEQ ID NO: 2446 - RNA, 22 nt, Artificial Sequence
  Synthesized RNAi sequence
uccauucauaccauuuugcagu

SEQ ID NO: 2447 - RNA, 22 nt, Artificial Sequence
  Synthesized RNAi sequence
uccauuuauaacagcagcguac

SEQ ID NO: 2448 - RNA, 22 nt, Artificial Sequence
  Synthesized RNAi sequence
uccguaccagcugcuugugcug

SEQ ID NO: 2449 - RNA, 22 nt, Artificial Sequence
  Synthesized RNAi sequence
uccuaguaugucaacauggucu

SEQ ID NO: 2450 - RNA, 22 nt, Artificial Sequence
  Synthesized RNAi sequence
ucgauugagaaaccaccugucu

SEQ ID NO: 2451 - RNA, 22 nt, Artificial Sequence
  Synthesized RNAi sequence
ucuaaaacggcaauuccaguuu

SEQ ID NO: 2452 - RNA, 22 nt, Artificial Sequence
  Synthesized RNAi sequence
ucuaacaacaucaaaaggugua

SEQ ID NO: 2453 - RNA, 22 nt, Artificial Sequence
  Synthesized RNAi sequence
ucuaagucugugccagcaugaa

SEQ ID NO: 2454 - RNA, 22 nt, Artificial Sequence
  Synthesized RNAi sequence
ucuaauaaagcacuacccaaua

SEQ ID NO: 2455 - RNA, 22 nt, Artificial Sequence
  Synthesized RNAi sequence
ucuauguuaaaaccaacacuac

SEQ ID NO: 2456 - RNA, 22 nt, Artificial Sequence
  Synthesized RNAi sequence
ucuccauuuauaacagcagcgu

SEQ ID NO: 2457 - RNA, 22 nt, Artificial Sequence
  Synthesized RNAi sequence
ucugugccagcaugaacuccag

SEQ ID NO: 2458 - RNA, 22 nt, Artificial Sequence
  Synthesized RNAi sequence
ucuuaggauuggcuguaucaac

SEQ ID NO: 2459 - RNA, 22 nt, Artificial Sequence
  Synthesized RNAi sequence
ucuucagaggugcagaucacau

SEQ ID NO: 2460 - RNA, 22 nt, Artificial Sequence
  Synthesized RNAi sequence
ucuucauaauuaggguuaagca

SEQ ID NO: 2461 - RNA, 22 nt, Artificial Sequence
  Synthesized RNAi sequence
ucuucuaauaaagcacuaccca

SEQ ID NO: 2462 - RNA, 22 nt, Artificial Sequence
  Synthesized RNAi sequence
ucuuggacaguaaacuacguca

SEQ ID NO: 2463 - RNA, 22 nt, Artificial Sequence
  Synthesized RNAi sequence
ucuuguguuagagguucauaau

SEQ ID NO: 2464 - RNA, 22 nt, Artificial Sequence
  Synthesized RNAi sequence
ucuuuuaaugaagcacacauau

SEQ ID NO: 2465 - RNA, 22 nt, Artificial Sequence
  Synthesized RNAi sequence
ugaaauugggccucauagcaca

SEQ ID NO: 2466 - RNA, 22 nt, Artificial Sequence
  Synthesized RNAi sequence
ugaacauuaccagccuguacca

SEQ ID NO: 2467 - RNA, 22 nt, Artificial Sequence
  Synthesized RNAi sequence
ugaacccuuaauagugaaauug

SEQ ID NO: 2468 - RNA, 22 nt, Artificial Sequence
  Synthesized RNAi sequence
ugaacuccaguugguaauucca

SEQ ID NO: 2469 - RNA, 22 nt, Artificial Sequence
  Synthesized RNAi sequence
ugaagcacacauaucuaaaacg

SEQ ID NO: 2470 - RNA, 22 nt, Artificial Sequence
  Synthesized RNAi sequence
ugaaugcgaacaaacuuauacu

SEQ ID NO: 2471 - RNA, 22 nt, Artificial Sequence
  Synthesized RNAi sequence
ugagaaaccaccugucuccauu

SEQ ID NO: 2472 - RNA, 22 nt, Artificial Sequence
  Synthesized RNAi sequence
ugagcagaaagagguccuagua

SEQ ID NO: 2473 - RNA, 22 nt, Artificial Sequence
  Synthesized RNAi sequence
ugagcauugucuaacaacauca

SEQ ID NO: 2474 - RNA, 22 nt, Artificial Sequence
  Synthesized RNAi sequence
ugaguaaaucuucauaauuagg

SEQ ID NO: 2475 - RNA, 22 nt, Artificial Sequence
  Synthesized RNAi sequence
ugaguugaacauuaccagccug

SEQ ID NO: 2476 - RNA, 22 nt, Artificial Sequence
  Synthesized RNAi sequence
ugauuagacuuacgaaugagua

SEQ ID NO: 2477 - RNA, 22 nt, Artificial Sequence
  Synthesized RNAi sequence
ugauuguucuuuucacugcacu

SEQ ID NO: 2478 - RNA, 22 nt, Artificial Sequence
  Synthesized RNAi sequence
ugcacuuuggaaaguaacaccu

SEQ ID NO: 2479 - RNA, 22 nt, Artificial Sequence
  Synthesized RNAi sequence
ugcagaucacaugucuuggaca

SEQ ID NO: 2480 - RNA, 22 nt, Artificial Sequence
  Synthesized RNAi sequence
ugcaguaauucuuuuaaugaag

SEQ ID NO: 2481 - RNA, 22 nt, Artificial Sequence
  Synthesized RNAi sequence
ugcauagaauguccaauaaccc

SEQ ID NO: 2482 - RNA, 22 nt, Artificial Sequence
  Synthesized RNAi sequence
ugccagcaugaacuccaguugg

SEQ ID NO: 2483 - RNA, 22 nt, Artificial Sequence
  Synthesized RNAi sequence
ugccugucaacaaaagguccau

SEQ ID NO: 2484 - RNA, 22 nt, Artificial Sequence
  Synthesized RNAi sequence
ugcgaacaaacuuauacuuagg

SEQ ID NO: 2485 - RNA, 22 nt, Artificial Sequence
  Synthesized RNAi sequence
ugcuguuugccugucaacaaaa

SEQ ID NO: 2486 - RNA, 22 nt, Artificial Sequence
  Synthesized RNAi sequence
ugcuugugcuguuugccuguca

SEQ ID NO: 2487 - RNA, 22 nt, Artificial Sequence
  Synthesized RNAi sequence
uggaaaguaacaccugagcauu

SEQ ID NO: 2488 - RNA, 22 nt, Artificial Sequence
  Synthesized RNAi sequence
uggacaguaaacuacgucauca

SEQ ID NO: 2489 - RNA, 22 nt, Artificial Sequence
  Synthesized RNAi sequence
uggcuguaucaaccuuaagcuu

SEQ ID NO: 2490 - RNA, 22 nt, Artificial Sequence
  Synthesized RNAi sequence
ugggccucauagcacauuggua

SEQ ID NO: 2491 - RNA, 22 nt, Artificial Sequence
  Synthesized RNAi sequence
ugguaaaucgauugagaaacca

SEQ ID NO: 2492 - RNA, 22 nt, Artificial Sequence
  Synthesized RNAi sequence
ugguacguccauucauaccauu

SEQ ID NO: 2493 - RNA, 22 nt, Artificial Sequence
  Synthesized RNAi sequence
uggucuuguguuagagguucau

SEQ ID NO: 2494 - RNA, 22 nt, Artificial Sequence
  Synthesized RNAi sequence
ugguguguacccuugauuguuc

SEQ ID NO: 2495 - RNA, 22 nt, Artificial Sequence
  Synthesized RNAi sequence
uguaaauucaucuucuaauaaa

SEQ ID NO: 2496 - RNA, 22 nt, Artificial Sequence
  Synthesized RNAi sequence
uguaauaguuguguccguacca

SEQ ID NO: 2497 - RNA, 22 nt, Artificial Sequence
  Synthesized RNAi sequence
uguaccaagaaauuaugauuag

SEQ ID NO: 2498 - RNA, 22 nt, Artificial Sequence
  Synthesized RNAi sequence
uguaccacaaguuacuuguacc

SEQ ID NO: 2499 - RNA, 22 nt, Artificial Sequence
  Synthesized RNAi sequence
uguacuucauagccacaagguu

SEQ ID NO: 2500 - RNA, 22 nt, Artificial Sequence
  Synthesized RNAi sequence
uguaguuguaccacaaguuacu

SEQ ID NO: 2501 - RNA, 22 nt, Artificial Sequence
  Synthesized RNAi sequence
uguaucaaccuuaagcuuaagu

SEQ ID NO: 2502 - RNA, 22 nt, Artificial Sequence
  Synthesized RNAi sequence
ugucaacaaaagguccauaaaa

SEQ ID NO: 2503 - RNA, 22 nt, Artificial Sequence
  Synthesized RNAi sequence
uguccguaccagcugcuugugc

SEQ ID NO: 2504 - RNA, 22 nt, Artificial Sequence
  Synthesized RNAi sequence
ugucuccauuuauaacagcagc

SEQ ID NO: 2505 - RNA, 22 nt, Artificial Sequence
  Synthesized RNAi sequence
ugucuuaggauuggcuguauca

SEQ ID NO: 2506 - RNA, 22 nt, Artificial Sequence
  Synthesized RNAi sequence
ugucuuggacaguaaacuacgu

SEQ ID NO: 2507 - RNA, 22 nt, Artificial Sequence
  Synthesized RNAi sequence
ugugccagcaugaacuccaguu

SEQ ID NO: 2508 - RNA, 22 nt, Artificial Sequence
  Synthesized RNAi sequence
ugugcuguuugccugucaacaa

SEQ ID NO: 2509 - RNA, 22 nt, Artificial Sequence
  Synthesized RNAi sequence
ugugguaaaucgauugagaaac

SEQ ID NO: 2510 - RNA, 22 nt, Artificial Sequence
  Synthesized RNAi sequence
uguguacccuugauuguucuuu

SEQ ID NO: 2511 - RNA, 22 nt, Artificial Sequence
  Synthesized RNAi sequence
uguguccguaccagcugcuugu

SEQ ID NO: 2512 - RNA, 22 nt, Artificial Sequence
  Synthesized RNAi sequence
uguguuagagguucauaauugu

SEQ ID NO: 2513 - RNA, 22 nt, Artificial Sequence
  Synthesized RNAi sequence
uguuaaaaccaacacuaccaca

SEQ ID NO: 2514 - RNA, 22 nt, Artificial Sequence
  Synthesized RNAi sequence
uguuagagguucauaauuguac

SEQ ID NO: 2515 - RNA, 22 nt, Artificial Sequence
  Synthesized RNAi sequence
uguucuuuucacugcacuuugg

SEQ ID NO: 2516 - RNA, 22 nt, Artificial Sequence
  Synthesized RNAi sequence
uguuugccugucaacaaaaggu

SEQ ID NO: 2517 - RNA, 22 nt, Artificial Sequence
  Synthesized RNAi sequence
uuaaaaccaacacuaccacaug

SEQ ID NO: 2518 - RNA, 22 nt, Artificial Sequence
  Synthesized RNAi sequence
uuaaagucauuaagaguugugg

SEQ ID NO: 2519 - RNA, 22 nt, Artificial Sequence
  Synthesized RNAi sequence
uuaacuguaauaguuguguccg

SEQ ID NO: 2520 - RNA, 22 nt, Artificial Sequence
  Synthesized RNAi sequence
uuaagaguugugguaaaucgau

SEQ ID NO: 2521 - RNA, 22 nt, Artificial Sequence
  Synthesized RNAi sequence
uuaagcaugucuucagaggugc

SEQ ID NO: 2522 - RNA, 22 nt, Artificial Sequence
  Synthesized RNAi sequence
uuaaggaaugaacccuuaauag

SEQ ID NO: 2523 - RNA, 22 nt, Artificial Sequence
  Synthesized RNAi sequence
uuaaguacacaauuuugcauag

SEQ ID NO: 2524 - RNA, 22 nt, Artificial Sequence
  Synthesized RNAi sequence
uuaaguguaguuguaccacaag

SEQ ID NO: 2525 - RNA, 22 nt, Artificial Sequence
  Synthesized RNAi sequence
uuaauagugaaauugggccuca

SEQ ID NO: 2526 - RNA, 22 nt, Artificial Sequence
  Synthesized RNAi sequence
uuaaugaagcacacauaucuaa

SEQ ID NO: 2527 - RNA, 22 nt, Artificial Sequence
  Synthesized RNAi sequence
uuaccagccuguaccaagaaau

SEQ ID NO: 2528 - RNA, 22 nt, Artificial Sequence
  Synthesized RNAi sequence
uuaccuucuaagucugugccag

SEQ ID NO: 2529 - RNA, 22 nt, Artificial Sequence
  Synthesized RNAi sequence
uuacuuguaccauacaacccuc

SEQ ID NO: 2530 - RNA, 22 nt, Artificial Sequence
  Synthesized RNAi sequence
uuagacuuacgaaugaguaaau

SEQ ID NO: 2531 - RNA, 22 nt, Artificial Sequence
  Synthesized RNAi sequence
uuagagguucauaauuguacuu

SEQ ID NO: 2532 - RNA, 22 nt, Artificial Sequence
  Synthesized RNAi sequence
uuaggauuggcuguaucaaccu

SEQ ID NO: 2533 - RNA, 22 nt, Artificial Sequence
  Synthesized RNAi sequence
uuaggguuaagcaugucuucag

SEQ ID NO: 2534 - RNA, 22 nt, Artificial Sequence
  Synthesized RNAi sequence
uuaggugucuuaggauuggcug

SEQ ID NO: 2535 - RNA, 22 nt, Artificial Sequence
  Synthesized RNAi sequence
uuauaacagcagcguacaacca

SEQ ID NO: 2536 - RNA, 22 nt, Artificial Sequence
  Synthesized RNAi sequence
uuauacuuaggugucuuaggau

SEQ ID NO: 2537 - RNA, 22 nt, Artificial Sequence
  Synthesized RNAi sequence
uuaugauuagacuuacgaauga

SEQ ID NO: 2538 - RNA, 22 nt, Artificial Sequence
  Synthesized RNAi sequence
uucacugcacuuuggaaaguaa

SEQ ID NO: 2539 - RNA, 22 nt, Artificial Sequence
  Synthesized RNAi sequence
uucauaauuaggguuaagcaug

SEQ ID NO: 2540 - RNA, 22 nt, Artificial Sequence
  Synthesized RNAi sequence
uucauaauuguacuucauagcc

SEQ ID NO: 2541 - RNA, 22 nt, Artificial Sequence
  Synthesized RNAi sequence
uucauaccauuuugcaguaauu

SEQ ID NO: 2542 - RNA, 22 nt, Artificial Sequence
  Synthesized RNAi sequence
uucauagccacaagguuaaagu

SEQ ID NO: 2543 - RNA, 22 nt, Artificial Sequence
  Synthesized RNAi sequence
uucaucuucuaauaaagcacua

SEQ ID NO: 2544 - RNA, 22 nt, Artificial Sequence
  Synthesized RNAi sequence
uuccaguuugagcagaaagagg

SEQ ID NO: 2545 - RNA, 22 nt, Artificial Sequence
  Synthesized RNAi sequence
uucuaagucugugccagcauga

SEQ ID NO: 2546 - RNA, 22 nt, Artificial Sequence
  Synthesized RNAi sequence
uucuuuuaaugaagcacacaua

SEQ ID NO: 2547 - RNA, 22 nt, Artificial Sequence
  Synthesized RNAi sequence
uucuuuucacugcacuuuggaa

SEQ ID NO: 2548 - RNA, 22 nt, Artificial Sequence
  Synthesized RNAi sequence
uugaacauuaccagccuguacc

SEQ ID NO: 2549 - RNA, 22 nt, Artificial Sequence
  Synthesized RNAi sequence
uugaaugcgaacaaacuuauac

SEQ ID NO: 2550 - RNA, 22 nt, Artificial Sequence
  Synthesized RNAi sequence
uugagaaaccaccugucuccau

SEQ ID NO: 2551 - RNA, 22 nt, Artificial Sequence
  Synthesized RNAi sequence
uugagcagaaagagguccuagu

SEQ ID NO: 2552 - RNA, 22 nt, Artificial Sequence
  Synthesized RNAi sequence
uugauuguucuuuucacugcac

SEQ ID NO: 2553 - RNA, 22 nt, Artificial Sequence
  Synthesized RNAi sequence
uugcaguaauucuuuuaaugaa

SEQ ID NO: 2554 - RNA, 22 nt, Artificial Sequence
  Synthesized RNAi sequence
uugcauagaauguccaauaacc

SEQ ID NO: 2555 - RNA, 22 nt, Artificial Sequence
  Synthesized RNAi sequence
uugccugucaacaaaaggucca

SEQ ID NO: 2556 - RNA, 22 nt, Artificial Sequence
  Synthesized RNAi sequence
uuggaaaguaacaccugagcau

SEQ ID NO: 2557 - RNA, 22 nt, Artificial Sequence
  Synthesized RNAi sequence
uuggacaguaaacuacgucauc

SEQ ID NO: 2558 - RNA, 22 nt, Artificial Sequence
  Synthesized RNAi sequence
uuggcuguaucaaccuuaagcu

SEQ ID NO: 2559 - RNA, 22 nt, Artificial Sequence
  Synthesized RNAi sequence
uugggccucauagcacauuggu

SEQ ID NO: 2560 - RNA, 22 nt, Artificial Sequence
  Synthesized RNAi sequence
uugguaaacaccagauggugaa

SEQ ID NO: 2561 - RNA, 22 nt, Artificial Sequence
  Synthesized RNAi sequence
uuguaccacaaguuacuuguac

SEQ ID NO: 2562 - RNA, 22 nt, Artificial Sequence
  Synthesized RNAi sequence
uuguacuucauagccacaaggu

SEQ ID NO: 2563 - RNA, 22 nt, Artificial Sequence
  Synthesized RNAi sequence
uugugguaaaucgauugagaaa

SEQ ID NO: 2564 - RNA, 22 nt, Artificial Sequence
  Synthesized RNAi sequence
uuguguccguaccagcugcuug

SEQ ID NO: 2565 - RNA, 22 nt, Artificial Sequence
  Synthesized RNAi sequence
uuguguuagagguucauaauug

SEQ ID NO: 2566 - RNA, 22 nt, Artificial Sequence
  Synthesized RNAi sequence
uuguucuuuucacugcacuuug

SEQ ID NO: 2567 - RNA, 22 nt, Artificial Sequence
  Synthesized RNAi sequence
uuuaaugaagcacacauaucua

SEQ ID NO: 2568 - RNA, 22 nt, Artificial Sequence
  Synthesized RNAi sequence
uuuauaacagcagcguacaacc

SEQ ID NO: 2569 - RNA, 22 nt, Artificial Sequence
  Synthesized RNAi sequence
uuucacugcacuuuggaaagua

SEQ ID NO: 2570 - RNA, 22 nt, Artificial Sequence
  Synthesized RNAi sequence
uuugagcagaaagagguccuag

SEQ ID NO: 2571 - RNA, 22 nt, Artificial Sequence
  Synthesized RNAi sequence
uuugcaguaauucuuuuaauga

SEQ ID NO: 2572 - RNA, 22 nt, Artificial Sequence
  Synthesized RNAi sequence
uuugccugucaacaaaaggucc

SEQ ID NO: 2573 - RNA, 22 nt, Artificial Sequence
  Synthesized RNAi sequence
uuuggaaaguaacaccugagca

SEQ ID NO: 2574 - RNA, 22 nt, Artificial Sequence
  Synthesized RNAi sequence
uuuucacugcacuuuggaaagu

SEQ ID NO: 2575 - RNA, 22 nt, Artificial Sequence
  Synthesized RNAi sequence
aacaauauugcagcaguacgca

SEQ ID NO: 2576 - RNA, 22 nt, Artificial Sequence
  Synthesized RNAi sequence
aacuauuaacguaccugucucu

SEQ ID NO: 2577 - RNA, 22 nt, Artificial Sequence
  Synthesized RNAi sequence
aagacucacguuaacaauauug

SEQ ID NO: 2578 - RNA, 22 nt, Artificial Sequence
  Synthesized RNAi sequence
aagcgcaguaaggauggcuagu

SEQ ID NO: 2579 - RNA, 22 nt, Artificial Sequence
  Synthesized RNAi sequence
aaggauggcuaguguaacuagc

SEQ ID NO: 2580 - RNA, 22 nt, Artificial Sequence
  Synthesized RNAi sequence
aauauugcagcaguacgcacac

SEQ ID NO: 2581 - RNA, 22 nt, Artificial Sequence
  Synthesized RNAi sequence
aaucgaagcgcaguaaggaugg

SEQ ID NO: 2582 - RNA, 22 nt, Artificial Sequence
  Synthesized RNAi sequence
acaauauugcagcaguacgcac

SEQ ID NO: 2583 - RNA, 22 nt, Artificial Sequence
  Synthesized RNAi sequence
acaaucgaagcgcaguaaggau

SEQ ID NO: 2584 - RNA, 22 nt, Artificial Sequence
  Synthesized RNAi sequence
acacaaucgaagcgcaguaagg

SEQ ID NO: 2585 - RNA, 22 nt, Artificial Sequence
  Synthesized RNAi sequence
acgcacacaaucgaagcgcagu

SEQ ID NO: 2586 - RNA, 22 nt, Artificial Sequence
  Synthesized RNAi sequence
acguuaacaauauugcagcagu

SEQ ID NO: 2587 - RNA, 22 nt, Artificial Sequence
  Synthesized RNAi sequence
acuauuaacguaccugucucuu

SEQ ID NO: 2588 - RNA, 22 nt, Artificial Sequence
  Synthesized RNAi sequence
acucacguuaacaauauugcag

SEQ ID NO: 2589 - RNA, 22 nt, Artificial Sequence
  Synthesized RNAi sequence
agacucacguuaacaauauugc

SEQ ID NO: 2590 - RNA, 22 nt, Artificial Sequence
  Synthesized RNAi sequence
agcaguacgcacacaaucgaag

SEQ ID NO: 2591 - RNA, 22 nt, Artificial Sequence
  Synthesized RNAi sequence
agcgcaguaaggauggcuagug

SEQ ID NO: 2592 - RNA, 22 nt, Artificial Sequence
  Synthesized RNAi sequence
aggauggcuaguguaacuagca

SEQ ID NO: 2593 - RNA, 22 nt, Artificial Sequence
  Synthesized RNAi sequence
aguaaggauggcuaguguaacu

SEQ ID NO: 2594 - RNA, 22 nt, Artificial Sequence
  Synthesized RNAi sequence
aguacgcacacaaucgaagcgc

SEQ ID NO: 2595 - RNA, 22 nt, Artificial Sequence
  Synthesized RNAi sequence
aguucguuuagaccagaagauc

SEQ ID NO: 2596 - RNA, 22 nt, Artificial Sequence
  Synthesized RNAi sequence
auauugcagcaguacgcacaca

SEQ ID NO: 2597 - RNA, 22 nt, Artificial Sequence
  Synthesized RNAi sequence
aucgaagcgcaguaaggauggc

SEQ ID NO: 2598 - RNA, 22 nt, Artificial Sequence
  Synthesized RNAi sequence
auggcuaguguaacuagcaaga

SEQ ID NO: 2599 - RNA, 22 nt, Artificial Sequence
  Synthesized RNAi sequence
auuaacguaccugucucuuccg

SEQ ID NO: 2600 - RNA, 22 nt, Artificial Sequence
  Synthesized RNAi sequence
auuaacuauuaacguaccuguc

SEQ ID NO: 2601 - RNA, 22 nt, Artificial Sequence
  Synthesized RNAi sequence
auuuaguucguuuagaccagaa

SEQ ID NO: 2602 - RNA, 22 nt, Artificial Sequence
  Synthesized RNAi sequence
uaacaauauugcagcaguacgc

SEQ ID NO: 2603 - RNA, 22 nt, Artificial Sequence
  Synthesized RNAi sequence
uaacguaccugucucuuccgaa

SEQ ID NO: 2604 - RNA, 22 nt, Artificial Sequence
  Synthesized RNAi sequence
uaacuauuaacguaccugucuc

SEQ ID NO: 2605 - RNA, 22 nt, Artificial Sequence
  Synthesized RNAi sequence
uaaggauggcuaguguaacuag

SEQ ID NO: 2606 - RNA, 22 nt, Artificial Sequence
  Synthesized RNAi sequence
uacgcacacaaucgaagcgcag

SEQ ID NO: 2607 - RNA, 22 nt, Artificial Sequence
  Synthesized RNAi sequence
uaguguaacuagcaagaauacc

SEQ ID NO: 2608 - RNA, 22 nt, Artificial Sequence
  Synthesized RNAi sequence
uaguucguuuagaccagaagau

SEQ ID NO: 2609 - RNA, 22 nt, Artificial Sequence
  Synthesized RNAi sequence
uauuaacguaccugucucuucc

SEQ ID NO: 2610 - RNA, 22 nt, Artificial Sequence
  Synthesized RNAi sequence
uauugcagcaguacgcacacaa

SEQ ID NO: 2611 - RNA, 22 nt, Artificial Sequence
  Synthesized RNAi sequence
ucacguuaacaauauugcagca

SEQ ID NO: 2612 - RNA, 22 nt, Artificial Sequence
  Synthesized RNAi sequence
ucgaagcgcaguaaggauggcu

SEQ ID NO: 2613 - RNA, 22 nt, Artificial Sequence
  Synthesized RNAi sequence
ucguuuagaccagaagaucagg

SEQ ID NO: 2614 - RNA, 22 nt, Artificial Sequence
  Synthesized RNAi sequence
ugcagcaguacgcacacaaucg

SEQ ID NO: 2615 - RNA, 22 nt, Artificial Sequence
  Synthesized RNAi sequence
uggcuaguguaacuagcaagaa

SEQ ID NO: 2616 - RNA, 22 nt, Artificial Sequence
  Synthesized RNAi sequence
uuaacaauauugcagcaguacg

SEQ ID NO: 2617 - RNA, 22 nt, Artificial Sequence
  Synthesized RNAi sequence
uuaacguaccugucucuuccga

SEQ ID NO: 2618 - RNA, 22 nt, Artificial Sequence
  Synthesized RNAi sequence
uuaacuauuaacguaccugucu

SEQ ID NO: 2619 - RNA, 22 nt, Artificial Sequence
  Synthesized RNAi sequence
uuaguucguuuagaccagaaga

SEQ ID NO: 2620 - RNA, 22 nt, Artificial Sequence
  Synthesized RNAi sequence
uucguuuagaccagaagaucag

SEQ ID NO: 2621 - RNA, 22 nt, Artificial Sequence
  Synthesized RNAi sequence
uugcagcaguacgcacacaauc

SEQ ID NO: 2622 - RNA, 22 nt, Artificial Sequence
  Synthesized RNAi sequence
uuuaguucguuuagaccagaag

SEQ ID NO: 2623 - RNA, 22 nt, Artificial Sequence
  Synthesized RNAi sequence
aaacaauucuacaucaacacca

SEQ ID NO: 2624 - RNA, 22 nt, Artificial Sequence
  Synthesized RNAi sequence
aaacaccaauaguagauauaug

SEQ ID NO: 2625 - RNA, 22 nt, Artificial Sequence
  Synthesized RNAi sequence
aaacaguguuauuaaugauaga

SEQ ID NO: 2626 - RNA, 22 nt, Artificial Sequence
  Synthesized RNAi sequence
aaaccaccuaacugacuaugac

SEQ ID NO: 2627 - RNA, 22 nt, Artificial Sequence
  Synthesized RNAi sequence
aaacgauauguucgaaggcaua

SEQ ID NO: 2628 - RNA, 22 nt, Artificial Sequence
  Synthesized RNAi sequence
aaacguuuagcuaguccaauca

SEQ ID NO: 2629 - RNA, 22 nt, Artificial Sequence
  Synthesized RNAi sequence
aaacuacagauaaaucuuggga

SEQ ID NO: 2630 - RNA, 22 nt, Artificial Sequence
  Synthesized RNAi sequence
aaacugguacuucacccuguug

SEQ ID NO: 2631 - RNA, 22 nt, Artificial Sequence
  Synthesized RNAi sequence
aaagcauaaaugaaauuucugu

SEQ ID NO: 2632 - RNA, 22 nt, Artificial Sequence
  Synthesized RNAi sequence
aaagcucaaaugcuacauuaac

SEQ ID NO: 2633 - RNA, 22 nt, Artificial Sequence
  Synthesized RNAi sequence
aaaggugauuccuuaaaacguu

SEQ ID NO: 2634 - RNA, 22 nt, Artificial Sequence
  Synthesized RNAi sequence
aaaguaaguuucagguaauugu

SEQ ID NO: 2635 - RNA, 22 nt, Artificial Sequence
  Synthesized RNAi sequence
aaagugucccuuauuuacaaca

SEQ ID NO: 2636 - RNA, 22 nt, Artificial Sequence
  Synthesized RNAi sequence
aaauaagucuacuugaccauca

SEQ ID NO: 2637 - RNA, 22 nt, Artificial Sequence
  Synthesized RNAi sequence
aaaucaauaacagaacacacac

SEQ ID NO: 2638 - RNA, 22 nt, Artificial Sequence
  Synthesized RNAi sequence
aaaucaauuuccauuugacucc

SEQ ID NO: 2639 - RNA, 22 nt, Artificial Sequence
  Synthesized RNAi sequence
aaaucguuucaguugguuucuu

SEQ ID NO: 2640 - RNA, 22 nt, Artificial Sequence
  Synthesized RNAi sequence
aaaucuccauaaacgauauguu

SEQ ID NO: 2641 - RNA, 22 nt, Artificial Sequence
  Synthesized RNAi sequence
aaaucuucuaauucaaaaggug

SEQ ID NO: 2642 - RNA, 22 nt, Artificial Sequence
  Synthesized RNAi sequence
aaaucuugggauuuuauuauuu

SEQ ID NO: 2643 - RNA, 22 nt, Artificial Sequence
  Synthesized RNAi sequence
aaaugaaauuucuguauaguca

SEQ ID NO: 2644 - RNA, 22 nt, Artificial Sequence
  Synthesized RNAi sequence
aaaugcuacauuaacagguaau

SEQ ID NO: 2645 - RNA, 22 nt, Artificial Sequence
  Synthesized RNAi sequence
aaauguuucuacauggccaucu

SEQ ID NO: 2646 - RNA, 22 nt, Artificial Sequence
  Synthesized RNAi sequence
aaauuauugaguauuuucaccu

SEQ ID NO: 2647 - RNA, 22 nt, Artificial Sequence
  Synthesized RNAi sequence
aaauucuuguaaauuucuacuc

SEQ ID NO: 2648 - RNA, 22 nt, Artificial Sequence
  Synthesized RNAi sequence
aaauuucuacucugaguaaagu

SEQ ID NO: 2649 - RNA, 22 nt, Artificial Sequence
  Synthesized RNAi sequence
aaauuucuguauagucaauagu

SEQ ID NO: 2650 - RNA, 22 nt, Artificial Sequence
  Synthesized RNAi sequence
aacaaaaucaucaaguaauaaa

SEQ ID NO: 2651 - RNA, 22 nt, Artificial Sequence
  Synthesized RNAi sequence
aacaaacaccaauaguagauau

SEQ ID NO: 2652 - RNA, 22 nt, Artificial Sequence
  Synthesized RNAi sequence
aacaauucuacaucaacaccau

SEQ ID NO: 2653 - RNA, 22 nt, Artificial Sequence
  Synthesized RNAi sequence
aacacacacacuuagaugaacc

SEQ ID NO: 2654 - RNA, 22 nt, Artificial Sequence
  Synthesized RNAi sequence
aacaccaauaguagauauaugu

SEQ ID NO: 2655 - RNA, 22 nt, Artificial Sequence
  Synthesized RNAi sequence
aacaccaucaacuuucuuauaa

SEQ ID NO: 2656 - RNA, 22 nt, Artificial Sequence
  Synthesized RNAi sequence
aacaccauuacgggcauuucua

SEQ ID NO: 2657 - RNA, 22 nt, Artificial Sequence
  Synthesized RNAi sequence
aacacccgguugccacgcuuga

SEQ ID NO: 2658 - RNA, 22 nt, Artificial Sequence
  Synthesized RNAi sequence
aacacuaccuucuguaauaaga

SEQ ID NO: 2659 - RNA, 22 nt, Artificial Sequence
  Synthesized RNAi sequence
aacagaacacacacacuuagau

SEQ ID NO: 2660 - RNA, 22 nt, Artificial Sequence
  Synthesized RNAi sequence
aacagguaauguuguuuuauuu

SEQ ID NO: 2661 - RNA, 22 nt, Artificial Sequence
  Synthesized RNAi sequence
aacaguguuauuaaugauagaa

SEQ ID NO: 2662 - RNA, 22 nt, Artificial Sequence
  Synthesized RNAi sequence
aaccaccuaacugacuaugacu

SEQ ID NO: 2663 - RNA, 22 nt, Artificial Sequence
  Synthesized RNAi sequence
aaccuuagaaacuacagauaaa

SEQ ID NO: 2664 - RNA, 22 nt, Artificial Sequence
  Synthesized RNAi sequence
aaccuuuaacacuaccuucugu

SEQ ID NO: 2665 - RNA, 22 nt, Artificial Sequence
  Synthesized RNAi sequence
aacgauauguucgaaggcauag

SEQ ID NO: 2666 - RNA, 22 nt, Artificial Sequence
  Synthesized RNAi sequence
aacguuuagcuaguccaaucag

SEQ ID NO: 2667 - RNA, 22 nt, Artificial Sequence
  Synthesized RNAi sequence
aacuacagauaaaucuugggau

SEQ ID NO: 2668 - RNA, 22 nt, Artificial Sequence
  Synthesized RNAi sequence
aacugacuaugacuaaaaucuc

SEQ ID NO: 2669 - RNA, 22 nt, Artificial Sequence
  Synthesized RNAi sequence
aacugguacuucacccuguugu

SEQ ID NO: 2670 - RNA, 22 nt, Artificial Sequence
  Synthesized RNAi sequence
aacuuuuguguaaacaguguua

SEQ ID NO: 2671 - RNA, 22 nt, Artificial Sequence
  Synthesized RNAi sequence
aagaaaucaauuuccauuugac

SEQ ID NO: 2672 - RNA, 22 nt, Artificial Sequence
  Synthesized RNAi sequence
aagaacaccauuacgggcauuu

SEQ ID NO: 2673 - RNA, 22 nt, Artificial Sequence
  Synthesized RNAi sequence
aagacuagcuuguuugggaccu

SEQ ID NO: 2674 - RNA, 22 nt, Artificial Sequence
  Synthesized RNAi sequence
aagcucaaaugcuacauuaaca

SEQ ID NO: 2675 - RNA, 22 nt, Artificial Sequence
  Synthesized RNAi sequence
aaggcauagccuucuaauuuau

SEQ ID NO: 2676 - RNA, 22 nt, Artificial Sequence
  Synthesized RNAi sequence
aaggugauuccuuaaaacguuu

SEQ ID NO: 2677 - RNA, 22 nt, Artificial Sequence
  Synthesized RNAi sequence
aaguaaguuucagguaauuguu

SEQ ID NO: 2678 - RNA, 22 nt, Artificial Sequence
  Synthesized RNAi sequence
aaguaauaaaucaauaacagaa

SEQ ID NO: 2679 - RNA, 22 nt, Artificial Sequence
  Synthesized RNAi sequence
aagugucccuuauuuacaacau

SEQ ID NO: 2680 - RNA, 22 nt, Artificial Sequence
  Synthesized RNAi sequence
aaguuucagguaauuguuggac

SEQ ID NO: 2681 - RNA, 22 nt, Artificial Sequence
  Synthesized RNAi sequence
aauaacagaacacacacacuua

SEQ ID NO: 2682 - RNA, 22 nt, Artificial Sequence
  Synthesized RNAi sequence
aauaagaacaccauuacgggca

SEQ ID NO: 2683 - RNA, 22 nt, Artificial Sequence
  Synthesized RNAi sequence
aauaguagauauaugugcugga

SEQ ID NO: 2684 - RNA, 22 nt, Artificial Sequence
  Synthesized RNAi sequence
aauagucacuuugacaaccuua

SEQ ID NO: 2685 - RNA, 22 nt, Artificial Sequence
  Synthesized RNAi sequence
aaucaauaacagaacacacaca

SEQ ID NO: 2686 - RNA, 22 nt, Artificial Sequence
  Synthesized RNAi sequence
aaucaauuuccauuugacuccu

SEQ ID NO: 2687 - RNA, 22 nt, Artificial Sequence
  Synthesized RNAi sequence
aaucaguagauguaaaccaccu

SEQ ID NO: 2688 - RNA, 22 nt, Artificial Sequence
  Synthesized RNAi sequence
aaucguuucaguugguuucuug

SEQ ID NO: 2689 - RNA, 22 nt, Artificial Sequence
  Synthesized RNAi sequence
aaucuccauaaacgauauguuc

SEQ ID NO: 2690 - RNA, 22 nt, Artificial Sequence
  Synthesized RNAi sequence
aaucuugggauuuuauuauuuc

SEQ ID NO: 2691 - RNA, 22 nt, Artificial Sequence
  Synthesized RNAi sequence
aaugaaauuucuguauagucaa

SEQ ID NO: 2692 - RNA, 22 nt, Artificial Sequence
  Synthesized RNAi sequence
aaugauagaaacugguacuuca

SEQ ID NO: 2693 - RNA, 22 nt, Artificial Sequence
  Synthesized RNAi sequence
aaugcuacauuaacagguaaug

SEQ ID NO: 2694 - RNA, 22 nt, Artificial Sequence
  Synthesized RNAi sequence
aauguccacacccaaauuauug

SEQ ID NO: 2695 - RNA, 22 nt, Artificial Sequence
  Synthesized RNAi sequence
aaugugacuccauuaagacuag

SEQ ID NO: 2696 - RNA, 22 nt, Artificial Sequence
  Synthesized RNAi sequence
aauguugcgcuuagcccaaagc

SEQ ID NO: 2697 - RNA, 22 nt, Artificial Sequence
  Synthesized RNAi sequence
aauguuguuuuauuuucaaaca

SEQ ID NO: 2698 - RNA, 22 nt, Artificial Sequence
  Synthesized RNAi sequence
aauguuucuacauggccaucuu

SEQ ID NO: 2699 - RNA, 22 nt, Artificial Sequence
  Synthesized RNAi sequence
aauuaaugugacuccauuaaga

SEQ ID NO: 2700 - RNA, 22 nt, Artificial Sequence
  Synthesized RNAi sequence
aauucaaaaggugauuccuuaa

SEQ ID NO: 2701 - RNA, 22 nt, Artificial Sequence
  Synthesized RNAi sequence
aauucuaagaaaucaauuucca

SEQ ID NO: 2702 - RNA, 22 nt, Artificial Sequence
  Synthesized RNAi sequence
aauucuacaucaacaccaucaa

SEQ ID NO: 2703 - RNA, 22 nt, Artificial Sequence
  Synthesized RNAi sequence
aauucuuguaaauuucuacucu

SEQ ID NO: 2704 - RNA, 22 nt, Artificial Sequence
  Synthesized RNAi sequence
aauuguuggacaacaccaucaa

SEQ ID NO: 2705 - RNA, 22 nt, Artificial Sequence
  Synthesized RNAi sequence
aauuucuacucugaguaaagua

SEQ ID NO: 2706 - RNA, 22 nt, Artificial Sequence
  Synthesized RNAi sequence
aauuucuguauagucaauaguc

SEQ ID NO: 2707 - RNA, 22 nt, Artificial Sequence
  Synthesized RNAi sequence
aauuuuggguaaaauguuucua

SEQ ID NO: 2708 - RNA, 22 nt, Artificial Sequence
  Synthesized RNAi sequence
acaaaaucaucaaguaauaaau

SEQ ID NO: 2709 - RNA, 22 nt, Artificial Sequence
  Synthesized RNAi sequence
acaaacaccaauaguagauaua

SEQ ID NO: 2710 - RNA, 22 nt, Artificial Sequence
  Synthesized RNAi sequence
acaaaucguuucaguugguuuc

SEQ ID NO: 2711 - RNA, 22 nt, Artificial Sequence
  Synthesized RNAi sequence
acaacaccaucaacuuucuuau

SEQ ID NO: 2712 - RNA, 22 nt, Artificial Sequence
  Synthesized RNAi sequence
acaaccuuagaaacuacagaua

SEQ ID NO: 2713 - RNA, 22 nt, Artificial Sequence
  Synthesized RNAi sequence
acaauucuacaucaacaccauc

SEQ ID NO: 2714 - RNA, 22 nt, Artificial Sequence
  Synthesized RNAi sequence
acacacacuuagaugaaccugu

SEQ ID NO: 2715 - RNA, 22 nt, Artificial Sequence
  Synthesized RNAi sequence
acacacuuagaugaaccuguuu

SEQ ID NO: 2716 - RNA, 22 nt, Artificial Sequence
  Synthesized RNAi sequence
acaccaaagcauaaaugaaauu

SEQ ID NO: 2717 - RNA, 22 nt, Artificial Sequence
  Synthesized RNAi sequence
acaccaauaguagauauaugug

SEQ ID NO: 2718 - RNA, 22 nt, Artificial Sequence
  Synthesized RNAi sequence
acaccaucaacuuuuguguaaa

SEQ ID NO: 2719 - RNA, 22 nt, Artificial Sequence
  Synthesized RNAi sequence
acaccauuacgggcauuucuaa

SEQ ID NO: 2720 - RNA, 22 nt, Artificial Sequence
  Synthesized RNAi sequence
acacccaaauuauugaguauuu

SEQ ID NO: 2721 - RNA, 22 nt, Artificial Sequence
  Synthesized RNAi sequence
acacuaccuucuguaauaagaa

SEQ ID NO: 2722 - RNA, 22 nt, Artificial Sequence
  Synthesized RNAi sequence
acacuuagaugaaccuguuugc

SEQ ID NO: 2723 - RNA, 22 nt, Artificial Sequence
  Synthesized RNAi sequence
acagaacacacacacuuagaug

SEQ ID NO: 2724 - RNA, 22 nt, Artificial Sequence
  Synthesized RNAi sequence
acagaugguuguaaaccuuuaa

SEQ ID NO: 2725 - RNA, 22 nt, Artificial Sequence
  Synthesized RNAi sequence
acaguauuagcagcaaugucca

SEQ ID NO: 2726 - RNA, 22 nt, Artificial Sequence
  Synthesized RNAi sequence
acaguguuauuaaugauagaaa

SEQ ID NO: 2727 - RNA, 22 nt, Artificial Sequence
  Synthesized RNAi sequence
acauggccaucuuuacaccaaa

SEQ ID NO: 2728 - RNA, 22 nt, Artificial Sequence
  Synthesized RNAi sequence
acauuaacagguaauguuguuu

SEQ ID NO: 2729 - RNA, 22 nt, Artificial Sequence
  Synthesized RNAi sequence
accaaagcauaaaugaaauuuc

SEQ ID NO: 2730 - RNA, 22 nt, Artificial Sequence
  Synthesized RNAi sequence
accaauaguagauauaugugcu

SEQ ID NO: 2731 - RNA, 22 nt, Artificial Sequence
  Synthesized RNAi sequence
accaccuaacugacuaugacua

SEQ ID NO: 2732 - RNA, 22 nt, Artificial Sequence
  Synthesized RNAi sequence
accaucaacuuucuuauaauaa

SEQ ID NO: 2733 - RNA, 22 nt, Artificial Sequence
  Synthesized RNAi sequence
accauuacgggcauuucuaaau

SEQ ID NO: 2734 - RNA, 22 nt, Artificial Sequence
  Synthesized RNAi sequence
acccgguugccacgcuugacua

SEQ ID NO: 2735 - RNA, 22 nt, Artificial Sequence
  Synthesized RNAi sequence
accuaacugacuaugacuaaaa

SEQ ID NO: 2736 - RNA, 22 nt, Artificial Sequence
  Synthesized RNAi sequence
accuacagaugguuguaaaccu

SEQ ID NO: 2737 - RNA, 22 nt, Artificial Sequence
  Synthesized RNAi sequence
accucugguacugguuuaaugu

SEQ ID NO: 2738 - RNA, 22 nt, Artificial Sequence
  Synthesized RNAi sequence
accuuagaaacuacagauaaau

SEQ ID NO: 2739 - RNA, 22 nt, Artificial Sequence
  Synthesized RNAi sequence
accuucuguaauaagaacacca

SEQ ID NO: 2740 - RNA, 22 nt, Artificial Sequence
  Synthesized RNAi sequence
accuuuaacacuaccuucugua

SEQ ID NO: 2741 - RNA, 22 nt, Artificial Sequence
  Synthesized RNAi sequence
acgauauguucgaaggcauagc

SEQ ID NO: 2742 - RNA, 22 nt, Artificial Sequence
  Synthesized RNAi sequence
acgcuugacuagauuguaauuu

SEQ ID NO: 2743 - RNA, 22 nt, Artificial Sequence
  Synthesized RNAi sequence
acgggcauuucuaaauaagucu

SEQ ID NO: 2744 - RNA, 22 nt, Artificial Sequence
  Synthesized RNAi sequence
acguuuagcuaguccaaucagu

SEQ ID NO: 2745 - RNA, 22 nt, Artificial Sequence
  Synthesized RNAi sequence
acuaaaaucuccauaaacgaua

SEQ ID NO: 2746 - RNA, 22 nt, Artificial Sequence
  Synthesized RNAi sequence
acuacagauaaaucuugggauu

SEQ ID NO: 2747 - RNA, 22 nt, Artificial Sequence
  Synthesized RNAi sequence
acuaccuucuguaauaagaaca

SEQ ID NO: 2748 - RNA, 22 nt, Artificial Sequence
  Synthesized RNAi sequence
acuagauuguaauuuuggguaa

SEQ ID NO: 2749 - RNA, 22 nt, Artificial Sequence
  Synthesized RNAi sequence
acuagcuuguuugggaccuaca

SEQ ID NO: 2750 - RNA, 22 nt, Artificial Sequence
  Synthesized RNAi sequence
acuaugacuaaaaucuccauaa

SEQ ID NO: 2751 - RNA, 22 nt, Artificial Sequence
  Synthesized RNAi sequence
acuccauuaagacuagcuuguu

SEQ ID NO: 2752 - RNA, 22 nt, Artificial Sequence
  Synthesized RNAi sequence
acuccuggguuuaaauucuugu

SEQ ID NO: 2753 - RNA, 22 nt, Artificial Sequence
  Synthesized RNAi sequence
acucugaguaaaguaaguuuca

SEQ ID NO: 2754 - RNA, 22 nt, Artificial Sequence
  Synthesized RNAi sequence
acugacuaugacuaaaaucucc

SEQ ID NO: 2755 - RNA, 22 nt, Artificial Sequence
  Synthesized RNAi sequence
acugguacuucacccuguuguc

SEQ ID NO: 2756 - RNA, 22 nt, Artificial Sequence
  Synthesized RNAi sequence
acugguuuaauguugcgcuuag

SEQ ID NO: 2757 - RNA, 22 nt, Artificial Sequence
  Synthesized RNAi sequence
acuuagaugaaccuguuugcgc

SEQ ID NO: 2758 - RNA, 22 nt, Artificial Sequence
  Synthesized RNAi sequence
acuucacccuguuguccaucaa

SEQ ID NO: 2759 - RNA, 22 nt, Artificial Sequence
  Synthesized RNAi sequence
acuuugacaaccuuagaaacua

SEQ ID NO: 2760 - RNA, 22 nt, Artificial Sequence
  Synthesized RNAi sequence
agaaacuacagauaaaucuugg

SEQ ID NO: 2761 - RNA, 22 nt, Artificial Sequence
  Synthesized RNAi sequence
agaaacugguacuucacccugu

SEQ ID NO: 2762 - RNA, 22 nt, Artificial Sequence
  Synthesized RNAi sequence
agaaaucaauuuccauuugacu

SEQ ID NO: 2763 - RNA, 22 nt, Artificial Sequence
  Synthesized RNAi sequence
agaacaaacaccaauaguagau

SEQ ID NO: 2764 - RNA, 22 nt, Artificial Sequence
  Synthesized RNAi sequence
agaacacacacacuuagaugaa

SEQ ID NO: 2765 - RNA, 22 nt, Artificial Sequence
  Synthesized RNAi sequence
agaacaccauuacgggcauuuc

SEQ ID NO: 2766 - RNA, 22 nt, Artificial Sequence
  Synthesized RNAi sequence
agacuagcuuguuugggaccua

SEQ ID NO: 2767 - RNA, 22 nt, Artificial Sequence
  Synthesized RNAi sequence
agauaaaucuugggauuuuauu

SEQ ID NO: 2768 - RNA, 22 nt, Artificial Sequence
  Synthesized RNAi sequence
agauauaugugcuggagcaucu

SEQ ID NO: 2769 - RNA, 22 nt, Artificial Sequence
  Synthesized RNAi sequence
agaugaaccuguuugcgcaucu

SEQ ID NO: 2770 - RNA, 22 nt, Artificial Sequence
  Synthesized RNAi sequence
agaugguuguaaaccuuuaaca

SEQ ID NO: 2771 - RNA, 22 nt, Artificial Sequence
  Synthesized RNAi sequence
agauguaaaccaccuaacugac

SEQ ID NO: 2772 - RNA, 22 nt, Artificial Sequence
  Synthesized RNAi sequence
agauuguaauuuuggguaaaau

SEQ ID NO: 2773 - RNA, 22 nt, Artificial Sequence
  Synthesized RNAi sequence
agcaauguccacacccaaauua

SEQ ID NO: 2774 - RNA, 22 nt, Artificial Sequence
  Synthesized RNAi sequence
agcagcaauguccacacccaaa

SEQ ID NO: 2775 - RNA, 22 nt, Artificial Sequence
  Synthesized RNAi sequence
agcaucucuuuuguagucccag

SEQ ID NO: 2776 - RNA, 22 nt, Artificial Sequence
  Synthesized RNAi sequence
agcccaaagcucaaaugcuaca

SEQ ID NO: 2777 - RNA, 22 nt, Artificial Sequence
  Synthesized RNAi sequence
agcuaguccaaucaguagaugu

SEQ ID NO: 2778 - RNA, 22 nt, Artificial Sequence
  Synthesized RNAi sequence
agcucaaaugcuacauuaacag

SEQ ID NO: 2779 - RNA, 22 nt, Artificial Sequence
  Synthesized RNAi sequence
agcuuguuugggaccuacagau

SEQ ID NO: 2780 - RNA, 22 nt, Artificial Sequence
  Synthesized RNAi sequence
aggaauaaaaucuucuaauuca

SEQ ID NO: 2781 - RNA, 22 nt, Artificial Sequence
  Synthesized RNAi sequence
aggcauagccuucuaauuuaua

SEQ ID NO: 2782 - RNA, 22 nt, Artificial Sequence
  Synthesized RNAi sequence
agguaauguuguuuuauuuuca

SEQ ID NO: 2783 - RNA, 22 nt, Artificial Sequence
  Synthesized RNAi sequence
agguaauuguuggacaacacca

SEQ ID NO: 2784 - RNA, 22 nt, Artificial Sequence
  Synthesized RNAi sequence
aggugauuccuuaaaacguuua

SEQ ID NO: 2785 - RNA, 22 nt, Artificial Sequence
  Synthesized RNAi sequence
aguaaaguaaguuucagguaau

SEQ ID NO: 2786 - RNA, 22 nt, Artificial Sequence
  Synthesized RNAi sequence
aguaaguuucagguaauuguug

SEQ ID NO: 2787 - RNA, 22 nt, Artificial Sequence
  Synthesized RNAi sequence
aguaauaaaucaauaacagaac

SEQ ID NO: 2788 - RNA, 22 nt, Artificial Sequence
  Synthesized RNAi sequence
aguagauauaugugcuggagca

SEQ ID NO: 2789 - RNA, 22 nt, Artificial Sequence
  Synthesized RNAi sequence
aguauuagcagcaauguccaca

SEQ ID NO: 2790 - RNA, 22 nt, Artificial Sequence
  Synthesized RNAi sequence
aguauuuucaccucugguacug

SEQ ID NO: 2791 - RNA, 22 nt, Artificial Sequence
  Synthesized RNAi sequence
agucaauagucacuuugacaac

SEQ ID NO: 2792 - RNA, 22 nt, Artificial Sequence
  Synthesized RNAi sequence
agucacuuugacaaccuuagaa

SEQ ID NO: 2793 - RNA, 22 nt, Artificial Sequence
  Synthesized RNAi sequence
agucauagaacaaacaccaaua

SEQ ID NO: 2794 - RNA, 22 nt, Artificial Sequence
  Synthesized RNAi sequence
aguccaaucaguagauguaaac

SEQ ID NO: 2795 - RNA, 22 nt, Artificial Sequence
  Synthesized RNAi sequence
agucccagaucacaguauuagc

SEQ ID NO: 2796 - RNA, 22 nt, Artificial Sequence
  Synthesized RNAi sequence
agugucccuuauuuacaacauu

SEQ ID NO: 2797 - RNA, 22 nt, Artificial Sequence
  Synthesized RNAi sequence
aguguuauuaaugauagaaacu

SEQ ID NO: 2798 - RNA, 22 nt, Artificial Sequence
  Synthesized RNAi sequence
aguugguuucuuggcuauguca

SEQ ID NO: 2799 - RNA, 22 nt, Artificial Sequence
  Synthesized RNAi sequence
aguuucagguaauuguuggaca

SEQ ID NO: 2800 - RNA, 22 nt, Artificial Sequence
  Synthesized RNAi sequence
auaaacgauauguucgaaggca

SEQ ID NO: 2801 - RNA, 22 nt, Artificial Sequence
  Synthesized RNAi sequence
auaaaucaauaacagaacacac

SEQ ID NO: 2802 - RNA, 22 nt, Artificial Sequence
  Synthesized RNAi sequence
auaaaucuugggauuuuauuau

SEQ ID NO: 2803 - RNA, 22 nt, Artificial Sequence
  Synthesized RNAi sequence
auaaaugaaauuucuguauagu

SEQ ID NO: 2804 - RNA, 22 nt, Artificial Sequence
  Synthesized RNAi sequence
auaacagaacacacacacuuag

SEQ ID NO: 2805 - RNA, 22 nt, Artificial Sequence
  Synthesized RNAi sequence
auaagaacaccauuacgggcau

SEQ ID NO: 2806 - RNA, 22 nt, Artificial Sequence
  Synthesized RNAi sequence
auagaaacugguacuucacccu

SEQ ID NO: 2807 - RNA, 22 nt, Artificial Sequence
  Synthesized RNAi sequence
auagaacaaacaccaauaguag

SEQ ID NO: 2808 - RNA, 22 nt, Artificial Sequence
  Synthesized RNAi sequence
auagcaacacccgguugccacg

SEQ ID NO: 2809 - RNA, 22 nt, Artificial Sequence
  Synthesized RNAi sequence
auaggaauaaaaucuucuaauu

SEQ ID NO: 2810 - RNA, 22 nt, Artificial Sequence
  Synthesized RNAi sequence
auaguagauauaugugcuggag

SEQ ID NO: 2811 - RNA, 22 nt, Artificial Sequence
  Synthesized RNAi sequence
auagucacuuugacaaccuuag

SEQ ID NO: 2812 - RNA, 22 nt, Artificial Sequence
  Synthesized RNAi sequence
auauaugugcuggagcaucucu

SEQ ID NO: 2813 - RNA, 22 nt, Artificial Sequence
  Synthesized RNAi sequence
auaugugcuggagcaucucuuu

SEQ ID NO: 2814 - RNA, 22 nt, Artificial Sequence
  Synthesized RNAi sequence
auauguucgaaggcauagccuu

SEQ ID NO: 2815 - RNA, 22 nt, Artificial Sequence
  Synthesized RNAi sequence
aucaaagugucccuuauuuaca

SEQ ID NO: 2816 - RNA, 22 nt, Artificial Sequence
  Synthesized RNAi sequence
aucaacaccaucaacuuuugug

SEQ ID NO: 2817 - RNA, 22 nt, Artificial Sequence
  Synthesized RNAi sequence
aucaacuuuuguguaaacagug

SEQ ID NO: 2818 - RNA, 22 nt, Artificial Sequence
  Synthesized RNAi sequence
aucaaguaauaaaucaauaaca

SEQ ID NO: 2819 - RNA, 22 nt, Artificial Sequence
  Synthesized RNAi sequence
aucaauaacagaacacacacac

SEQ ID NO: 2820 - RNA, 22 nt, Artificial Sequence
  Synthesized RNAi sequence
aucaauuuccauuugacuccug

SEQ ID NO: 2821 - RNA, 22 nt, Artificial Sequence
  Synthesized RNAi sequence
aucacaguauuagcagcaaugu

SEQ ID NO: 2822 - RNA, 22 nt, Artificial Sequence
  Synthesized RNAi sequence
aucaguagauguaaaccaccua

SEQ ID NO: 2823 - RNA, 22 nt, Artificial Sequence
  Synthesized RNAi sequence
aucaucaaguaauaaaucaaua

SEQ ID NO: 2824 - RNA, 22 nt, Artificial Sequence
  Synthesized RNAi sequence
aucguuucaguugguuucuugg

SEQ ID NO: 2825 - RNA, 22 nt, Artificial Sequence
  Synthesized RNAi sequence
aucuccauaaacgauauguucg

SEQ ID NO: 2826 - RNA, 22 nt, Artificial Sequence
  Synthesized RNAi sequence
aucucuuuuguagucccagauc

SEQ ID NO: 2827 - RNA, 22 nt, Artificial Sequence
  Synthesized RNAi sequence
aucuugggauuuuauuauuuca

SEQ ID NO: 2828 - RNA, 22 nt, Artificial Sequence
  Synthesized RNAi sequence
aucuuuacaccaaagcauaaau

SEQ ID NO: 2829 - RNA, 22 nt, Artificial Sequence
  Synthesized RNAi sequence
augaaccuguuugcgcaucugu

SEQ ID NO: 2830 - RNA, 22 nt, Artificial Sequence
  Synthesized RNAi sequence
augacuaaaaucuccauaaacg

SEQ ID NO: 2831 - RNA, 22 nt, Artificial Sequence
  Synthesized RNAi sequence
augauagaaacugguacuucac

SEQ ID NO: 2832 - RNA, 22 nt, Artificial Sequence
  Synthesized RNAi sequence
augcuacauuaacagguaaugu

SEQ ID NO: 2833 - RNA, 22 nt, Artificial Sequence
  Synthesized RNAi sequence
auggccaucuuuacaccaaagc

SEQ ID NO: 2834 - RNA, 22 nt, Artificial Sequence
  Synthesized RNAi sequence
augguuguaaaccuuuaacacu

SEQ ID NO: 2835 - RNA, 22 nt, Artificial Sequence
  Synthesized RNAi sequence
auguaaaccaccuaacugacua

SEQ ID NO: 2836 - RNA, 22 nt, Artificial Sequence
  Synthesized RNAi sequence
augucagucauagaacaaacac

SEQ ID NO: 2837 - RNA, 22 nt, Artificial Sequence
  Synthesized RNAi sequence
auguccacacccaaauuauuga

SEQ ID NO: 2838 - RNA, 22 nt, Artificial Sequence
  Synthesized RNAi sequence
augugacuccauuaagacuagc

SEQ ID NO: 2839 - RNA, 22 nt, Artificial Sequence
  Synthesized RNAi sequence
auguucgaaggcauagccuucu

SEQ ID NO: 2840 - RNA, 22 nt, Artificial Sequence
  Synthesized RNAi sequence
auguugcgcuuagcccaaagcu

SEQ ID NO: 2841 - RNA, 22 nt, Artificial Sequence
  Synthesized RNAi sequence
auguuguuuuauuuucaaacaa

SEQ ID NO: 2842 - RNA, 22 nt, Artificial Sequence
  Synthesized RNAi sequence
auguuucuacauggccaucuuu

SEQ ID NO: 2843 - RNA, 22 nt, Artificial Sequence
  Synthesized RNAi sequence
auuaacagguaauguuguuuua

SEQ ID NO: 2844 - RNA, 22 nt, Artificial Sequence
  Synthesized RNAi sequence
auuaagacuagcuuguuuggga

SEQ ID NO: 2845 - RNA, 22 nt, Artificial Sequence
  Synthesized RNAi sequence
auuaaugauagaaacugguacu

SEQ ID NO: 2846 - RNA, 22 nt, Artificial Sequence
  Synthesized RNAi sequence
auuaaugugacuccauuaagac

SEQ ID NO: 2847 - RNA, 22 nt, Artificial Sequence
  Synthesized RNAi sequence
auuacgggcauuucuaaauaag

SEQ ID NO: 2848 - RNA, 22 nt, Artificial Sequence
  Synthesized RNAi sequence
auuagcagcaauguccacaccc

SEQ ID NO: 2849 - RNA, 22 nt, Artificial Sequence
  Synthesized RNAi sequence
auuauugaguauuuucaccucu

SEQ ID NO: 2850 - RNA, 22 nt, Artificial Sequence
  Synthesized RNAi sequence
auuauuucaacaaaaucaucaa

SEQ ID NO: 2851 - RNA, 22 nt, Artificial Sequence
  Synthesized RNAi sequence
auucaaaaggugauuccuuaaa

SEQ ID NO: 2852 - RNA, 22 nt, Artificial Sequence
  Synthesized RNAi sequence
auuccuuaaaacguuuagcuag

SEQ ID NO: 2853 - RNA, 22 nt, Artificial Sequence
  Synthesized RNAi sequence
auucuaagaaaucaauuuccau

SEQ ID NO: 2854 - RNA, 22 nt, Artificial Sequence
  Synthesized RNAi sequence
auucuacaucaacaccaucaac

SEQ ID NO: 2855 - RNA, 22 nt, Artificial Sequence
  Synthesized RNAi sequence
auucuuguaaauuucuacucug

SEQ ID NO: 2856 - RNA, 22 nt, Artificial Sequence
  Synthesized RNAi sequence
auuguaauuuuggguaaaaugu

SEQ ID NO: 2857 - RNA, 22 nt, Artificial Sequence
  Synthesized RNAi sequence
auuguuggacaacaccaucaac

SEQ ID NO: 2858 - RNA, 22 nt, Artificial Sequence
  Synthesized RNAi sequence
auuucaacaaaaucaucaagua

SEQ ID NO: 2859 - RNA, 22 nt, Artificial Sequence
  Synthesized RNAi sequence
auuuccauuugacuccuggguu

SEQ ID NO: 2860 - RNA, 22 nt, Artificial Sequence
  Synthesized RNAi sequence
auuucuaaauaagucuacuuga

SEQ ID NO: 2861 - RNA, 22 nt, Artificial Sequence
  Synthesized RNAi sequence
auuucuacucugaguaaaguaa

SEQ ID NO: 2862 - RNA, 22 nt, Artificial Sequence
  Synthesized RNAi sequence
auuucuguauagucaauaguca

SEQ ID NO: 2863 - RNA, 22 nt, Artificial Sequence
  Synthesized RNAi sequence
auuugacuccuggguuuaaauu

SEQ ID NO: 2864 - RNA, 22 nt, Artificial Sequence
  Synthesized RNAi sequence
auuuucaccucugguacugguu

SEQ ID NO: 2865 - RNA, 22 nt, Artificial Sequence
  Synthesized RNAi sequence
auuuuggguaaaauguuucuac

SEQ ID NO: 2866 - RNA, 22 nt, Artificial Sequence
  Synthesized RNAi sequence
uaaaaucuccauaaacgauaug

SEQ ID NO: 2867 - RNA, 22 nt, Artificial Sequence
  Synthesized RNAi sequence
uaaaauguuucuacauggccau

SEQ ID NO: 2868 - RNA, 22 nt, Artificial Sequence
  Synthesized RNAi sequence
uaaacaguguuauuaaugauag

SEQ ID NO: 2869 - RNA, 22 nt, Artificial Sequence
  Synthesized RNAi sequence
uaaaccaccuaacugacuauga

SEQ ID NO: 2870 - RNA, 22 nt, Artificial Sequence
  Synthesized RNAi sequence
uaaacgauauguucgaaggcau

SEQ ID NO: 2871 - RNA, 22 nt, Artificial Sequence
  Synthesized RNAi sequence
uaaaguaaguuucagguaauug

SEQ ID NO: 2872 - RNA, 22 nt, Artificial Sequence
  Synthesized RNAi sequence
uaaauaagucuacuugaccauc

SEQ ID NO: 2873 - RNA, 22 nt, Artificial Sequence
  Synthesized RNAi sequence
uaaaucaauaacagaacacaca

SEQ ID NO: 2874 - RNA, 22 nt, Artificial Sequence
  Synthesized RNAi sequence
uaaaucuugggauuuuauuauu

SEQ ID NO: 2875 - RNA, 22 nt, Artificial Sequence
  Synthesized RNAi sequence
uaaaugaaauuucuguauaguc

SEQ ID NO: 2876 - RNA, 22 nt, Artificial Sequence
  Synthesized RNAi sequence
uaaauucuuguaaauuucuacu

SEQ ID NO: 2877 - RNA, 22 nt, Artificial Sequence
  Synthesized RNAi sequence
uaacacuaccuucuguaauaag

SEQ ID NO: 2878 - RNA, 22 nt, Artificial Sequence
  Synthesized RNAi sequence
uaacagaacacacacacuuaga

SEQ ID NO: 2879 - RNA, 22 nt, Artificial Sequence
  Synthesized RNAi sequence
uaacagguaauguuguuuuauu

SEQ ID NO: 2880 - RNA, 22 nt, Artificial Sequence
  Synthesized RNAi sequence
uaacugacuaugacuaaaaucu

SEQ ID NO: 2881 - RNA, 22 nt, Artificial Sequence
  Synthesized RNAi sequence
uaagaaaucaauuuccauuuga

SEQ ID NO: 2882 - RNA, 22 nt, Artificial Sequence
  Synthesized RNAi sequence
uaagaacaccauuacgggcauu

SEQ ID NO: 2883 - RNA, 22 nt, Artificial Sequence
  Synthesized RNAi sequence
uaagacuagcuuguuugggacc

SEQ ID NO: 2884 - RNA, 22 nt, Artificial Sequence
  Synthesized RNAi sequence
uaaguuucagguaauuguugga

SEQ ID NO: 2885 - RNA, 22 nt, Artificial Sequence
  Synthesized RNAi sequence
uaauaaaucaauaacagaacac

SEQ ID NO: 2886 - RNA, 22 nt, Artificial Sequence
  Synthesized RNAi sequence
uaauaagaacaccauuacgggc

SEQ ID NO: 2887 - RNA, 22 nt, Artificial Sequence
  Synthesized RNAi sequence
uaaugauagaaacugguacuuc

SEQ ID NO: 2888 - RNA, 22 nt, Artificial Sequence
  Synthesized RNAi sequence
uaaugugacuccauuaagacua

SEQ ID NO: 2889 - RNA, 22 nt, Artificial Sequence
  Synthesized RNAi sequence
uaauguugcgcuuagcccaaag

SEQ ID NO: 2890 - RNA, 22 nt, Artificial Sequence
  Synthesized RNAi sequence
uaauguuguuuuauuuucaaac

SEQ ID NO: 2891 - RNA, 22 nt, Artificial Sequence
  Synthesized RNAi sequence
uaauucaaaaggugauuccuua

SEQ ID NO: 2892 - RNA, 22 nt, Artificial Sequence
  Synthesized RNAi sequence
uaauuguuggacaacaccauca

SEQ ID NO: 2893 - RNA, 22 nt, Artificial Sequence
  Synthesized RNAi sequence
uaauuuuggguaaaauguuucu

SEQ ID NO: 2894 - RNA, 22 nt, Artificial Sequence
  Synthesized RNAi sequence
uacaccaaagcauaaaugaaau

SEQ ID NO: 2895 - RNA, 22 nt, Artificial Sequence
  Synthesized RNAi sequence
uacagaugguuguaaaccuuua

SEQ ID NO: 2896 - RNA, 22 nt, Artificial Sequence
  Synthesized RNAi sequence
uacauuaacagguaauguuguu

SEQ ID NO: 2897 - RNA, 22 nt, Artificial Sequence
  Synthesized RNAi sequence
uaccuucuguaauaagaacacc

SEQ ID NO: 2898 - RNA, 22 nt, Artificial Sequence
  Synthesized RNAi sequence
uacgggcauuucuaaauaaguc

SEQ ID NO: 2899 - RNA, 22 nt, Artificial Sequence
  Synthesized RNAi sequence
uacucugaguaaaguaaguuuc

SEQ ID NO: 2900 - RNA, 22 nt, Artificial Sequence
  Synthesized RNAi sequence
uacugguuuaauguugcgcuua

SEQ ID NO: 2901 - RNA, 22 nt, Artificial Sequence
  Synthesized RNAi sequence
uacuucacccuguuguccauca

SEQ ID NO: 2902 - RNA, 22 nt, Artificial Sequence
  Synthesized RNAi sequence
uagaaacuacagauaaaucuug

SEQ ID NO: 2903 - RNA, 22 nt, Artificial Sequence
  Synthesized RNAi sequence
uagaaacugguacuucacccug

SEQ ID NO: 2904 - RNA, 22 nt, Artificial Sequence
  Synthesized RNAi sequence
uagaacaaacaccaauaguaga

SEQ ID NO: 2905 - RNA, 22 nt, Artificial Sequence
  Synthesized RNAi sequence
uagauauaugugcuggagcauc

SEQ ID NO: 2906 - RNA, 22 nt, Artificial Sequence
  Synthesized RNAi sequence
uagaugaaccuguuugcgcauc

SEQ ID NO: 2907 - RNA, 22 nt, Artificial Sequence
  Synthesized RNAi sequence
uagauguaaaccaccuaacuga

SEQ ID NO: 2908 - RNA, 22 nt, Artificial Sequence
  Synthesized RNAi sequence
uagauuguaauuuuggguaaaa

SEQ ID NO: 2909 - RNA, 22 nt, Artificial Sequence
  Synthesized RNAi sequence
uagcagcaauguccacacccaa

SEQ ID NO: 2910 - RNA, 22 nt, Artificial Sequence
  Synthesized RNAi sequence
uagcccaaagcucaaaugcuac

SEQ ID NO: 2911 - RNA, 22 nt, Artificial Sequence
  Synthesized RNAi sequence
uagcuaguccaaucaguagaug

SEQ ID NO: 2912 - RNA, 22 nt, Artificial Sequence
  Synthesized RNAi sequence
uagcuuguuugggaccuacaga

SEQ ID NO: 2913 - RNA, 22 nt, Artificial Sequence
  Synthesized RNAi sequence
uaggaauaaaaucuucuaauuc

SEQ ID NO: 2914 - RNA, 22 nt, Artificial Sequence
  Synthesized RNAi sequence
uaguagauauaugugcuggagc

SEQ ID NO: 2915 - RNA, 22 nt, Artificial Sequence
  Synthesized RNAi sequence
uagucacuuugacaaccuuaga

SEQ ID NO: 2916 - RNA, 22 nt, Artificial Sequence
  Synthesized RNAi sequence
uaguccaaucaguagauguaaa

SEQ ID NO: 2917 - RNA, 22 nt, Artificial Sequence
  Synthesized RNAi sequence
uagucccagaucacaguauuag

SEQ ID NO: 2918 - RNA, 22 nt, Artificial Sequence
  Synthesized RNAi sequence
uauaugugcuggagcaucucuu

SEQ ID NO: 2919 - RNA, 22 nt, Artificial Sequence
  Synthesized RNAi sequence
uaugacuaaaaucuccauaaac

SEQ ID NO: 2920 - RNA, 22 nt, Artificial Sequence
  Synthesized RNAi sequence
uaugucagucauagaacaaaca

SEQ ID NO: 2921 - RNA, 22 nt, Artificial Sequence
  Synthesized RNAi sequence
uauguucgaaggcauagccuuc

SEQ ID NO: 2922 - RNA, 22 nt, Artificial Sequence
  Synthesized RNAi sequence
uauuaaugauagaaacugguac

SEQ ID NO: 2923 - RNA, 22 nt, Artificial Sequence
  Synthesized RNAi sequence
uauuauuucaacaaaaucauca

SEQ ID NO: 2924 - RNA, 22 nt, Artificial Sequence
  Synthesized RNAi sequence
uauugaguauuuucaccucugg

SEQ ID NO: 2925 - RNA, 22 nt, Artificial Sequence
  Synthesized RNAi sequence
uauuucaacaaaaucaucaagu

SEQ ID NO: 2926 - RNA, 22 nt, Artificial Sequence
  Synthesized RNAi sequence
uauuuucaaacaauucuacauc

SEQ ID NO: 2927 - RNA, 22 nt, Artificial Sequence
  Synthesized RNAi sequence
uauuuucaccucugguacuggu

SEQ ID NO: 2928 - RNA, 22 nt, Artificial Sequence
  Synthesized RNAi sequence
ucaaaaggugauuccuuaaaac

SEQ ID NO: 2929 - RNA, 22 nt, Artificial Sequence
  Synthesized RNAi sequence
ucaaacaauucuacaucaacac

SEQ ID NO: 2930 - RNA, 22 nt, Artificial Sequence
  Synthesized RNAi sequence
ucaaagugucccuuauuuacaa

SEQ ID NO: 2931 - RNA, 22 nt, Artificial Sequence
  Synthesized RNAi sequence
ucaaaugcuacauuaacaggua

SEQ ID NO: 2932 - RNA, 22 nt, Artificial Sequence
  Synthesized RNAi sequence
ucaacaccaucaacuuuugugu

SEQ ID NO: 2933 - RNA, 22 nt, Artificial Sequence
  Synthesized RNAi sequence
ucaacuuuuguguaaacagugu

SEQ ID NO: 2934 - RNA, 22 nt, Artificial Sequence
  Synthesized RNAi sequence
ucaaguaauaaaucaauaacag

SEQ ID NO: 2935 - RNA, 22 nt, Artificial Sequence
  Synthesized RNAi sequence
ucaauaacagaacacacacacu

SEQ ID NO: 2936 - RNA, 22 nt, Artificial Sequence
  Synthesized RNAi sequence
ucaauagucacuuugacaaccu

SEQ ID NO: 2937 - RNA, 22 nt, Artificial Sequence
  Synthesized RNAi sequence
ucaauuuccauuugacuccugg

SEQ ID NO: 2938 - RNA, 22 nt, Artificial Sequence
  Synthesized RNAi sequence
ucacaguauuagcagcaauguc

SEQ ID NO: 2939 - RNA, 22 nt, Artificial Sequence
  Synthesized RNAi sequence
ucacccuguuguccaucaaagu

SEQ ID NO: 2940 - RNA, 22 nt, Artificial Sequence
  Synthesized RNAi sequence
ucaccucugguacugguuuaau

SEQ ID NO: 2941 - RNA, 22 nt, Artificial Sequence
  Synthesized RNAi sequence
ucacuuugacaaccuuagaaac

SEQ ID NO: 2942 - RNA, 22 nt, Artificial Sequence
  Synthesized RNAi sequence
ucagguaauuguuggacaacac

SEQ ID NO: 2943 - RNA, 22 nt, Artificial Sequence
  Synthesized RNAi sequence
ucaguagauguaaaccaccuaa

SEQ ID NO: 2944 - RNA, 22 nt, Artificial Sequence
  Synthesized RNAi sequence
ucagucauagaacaaacaccaa

SEQ ID NO: 2945 - RNA, 22 nt, Artificial Sequence
  Synthesized RNAi sequence
ucaguugguuucuuggcuaugu

SEQ ID NO: 2946 - RNA, 22 nt, Artificial Sequence
  Synthesized RNAi sequence
ucauagaacaaacaccaauagu

SEQ ID NO: 2947 - RNA, 22 nt, Artificial Sequence
  Synthesized RNAi sequence
ucaucaaguaauaaaucaauaa

SEQ ID NO: 2948 - RNA, 22 nt, Artificial Sequence
  Synthesized RNAi sequence
uccaaucaguagauguaaacca

SEQ ID NO: 2949 - RNA, 22 nt, Artificial Sequence
  Synthesized RNAi sequence
uccacacccaaauuauugagua

SEQ ID NO: 2950 - RNA, 22 nt, Artificial Sequence
  Synthesized RNAi sequence
uccauaaacgauauguucgaag

SEQ ID NO: 2951 - RNA, 22 nt, Artificial Sequence
  Synthesized RNAi sequence
uccauaggaauaaaaucuucua

SEQ ID NO: 2952 - RNA, 22 nt, Artificial Sequence
  Synthesized RNAi sequence
uccaucaaagugucccuuauuu

SEQ ID NO: 2953 - RNA, 22 nt, Artificial Sequence
  Synthesized RNAi sequence
uccauuaagacuagcuuguuug

SEQ ID NO: 2954 - RNA, 22 nt, Artificial Sequence
  Synthesized RNAi sequence
uccauuugacuccuggguuuaa

SEQ ID NO: 2955 - RNA, 22 nt, Artificial Sequence
  Synthesized RNAi sequence
ucccagaucacaguauuagcag

SEQ ID NO: 2956 - RNA, 22 nt, Artificial Sequence
  Synthesized RNAi sequence
ucccuuauuuacaacauuaaaa

SEQ ID NO: 2957 - RNA, 22 nt, Artificial Sequence
  Synthesized RNAi sequence
uccuggguuuaaauucuuguaa

SEQ ID NO: 2958 - RNA, 22 nt, Artificial Sequence
  Synthesized RNAi sequence
uccuuaaaacguuuagcuaguc

SEQ ID NO: 2959 - RNA, 22 nt, Artificial Sequence
  Synthesized RNAi sequence
ucgaaggcauagccuucuaauu

SEQ ID NO: 2960 - RNA, 22 nt, Artificial Sequence
  Synthesized RNAi sequence
ucguuucaguugguuucuuggc

SEQ ID NO: 2961 - RNA, 22 nt, Artificial Sequence
  Synthesized RNAi sequence
ucuaaauaagucuacuugacca

SEQ ID NO: 2962 - RNA, 22 nt, Artificial Sequence
  Synthesized RNAi sequence
ucuaagaaaucaauuuccauuu

SEQ ID NO: 2963 - RNA, 22 nt, Artificial Sequence
  Synthesized RNAi sequence
ucuaauucaaaaggugauuccu

SEQ ID NO: 2964 - RNA, 22 nt, Artificial Sequence
  Synthesized RNAi sequence
ucuacaucaacaccaucaacuu

SEQ ID NO: 2965 - RNA, 22 nt, Artificial Sequence
  Synthesized RNAi sequence
ucuacauggccaucuuuacacc

SEQ ID NO: 2966 - RNA, 22 nt, Artificial Sequence
  Synthesized RNAi sequence
ucuccauaaacgauauguucga

SEQ ID NO: 2967 - RNA, 22 nt, Artificial Sequence
  Synthesized RNAi sequence
ucucuuuuguagucccagauca

SEQ ID NO: 2968 - RNA, 22 nt, Artificial Sequence
  Synthesized RNAi sequence
ucugaguaaaguaaguuucagg

SEQ ID NO: 2969 - RNA, 22 nt, Artificial Sequence
  Synthesized RNAi sequence
ucugguacugguuuaauguugc

SEQ ID NO: 2970 - RNA, 22 nt, Artificial Sequence
  Synthesized RNAi sequence
ucuguaauaagaacaccauuac

SEQ ID NO: 2971 - RNA, 22 nt, Artificial Sequence
  Synthesized RNAi sequence
ucuguauagucaauagucacuu

SEQ ID NO: 2972 - RNA, 22 nt, Artificial Sequence
  Synthesized RNAi sequence
ucuuggcuaugucagucauaga

SEQ ID NO: 2973 - RNA, 22 nt, Artificial Sequence
  Synthesized RNAi sequence
ucuugggauuuuauuauuucaa

SEQ ID NO: 2974 - RNA, 22 nt, Artificial Sequence
  Synthesized RNAi sequence
ucuuguaaauuucuacucugag

SEQ ID NO: 2975 - RNA, 22 nt, Artificial Sequence
  Synthesized RNAi sequence
ucuuuacaccaaagcauaaaug

SEQ ID NO: 2976 - RNA, 22 nt, Artificial Sequence
  Synthesized RNAi sequence
ucuuuuguagucccagaucaca

SEQ ID NO: 2977 - RNA, 22 nt, Artificial Sequence
  Synthesized RNAi sequence
ugaaauuucuguauagucaaua

SEQ ID NO: 2978 - RNA, 22 nt, Artificial Sequence
  Synthesized RNAi sequence
ugacaaccuuagaaacuacaga

SEQ ID NO: 2979 - RNA, 22 nt, Artificial Sequence
  Synthesized RNAi sequence
ugacuaaaaucuccauaaacga

SEQ ID NO: 2980 - RNA, 22 nt, Artificial Sequence
  Synthesized RNAi sequence
ugacuagauuguaauuuugggu

SEQ ID NO: 2981 - RNA, 22 nt, Artificial Sequence
  Synthesized RNAi sequence
ugacuaugacuaaaaucuccau

SEQ ID NO: 2982 - RNA, 22 nt, Artificial Sequence
  Synthesized RNAi sequence
ugacuccauuaagacuagcuug

SEQ ID NO: 2983 - RNA, 22 nt, Artificial Sequence
  Synthesized RNAi sequence
ugacuccuggguuuaaauucuu

SEQ ID NO: 2984 - RNA, 22 nt, Artificial Sequence
  Synthesized RNAi sequence
ugaguaaaguaaguuucaggua

SEQ ID NO: 2985 - RNA, 22 nt, Artificial Sequence
  Synthesized RNAi sequence
ugaguauuuucaccucugguac

SEQ ID NO: 2986 - RNA, 22 nt, Artificial Sequence
  Synthesized RNAi sequence
ugauagaaacugguacuucacc

SEQ ID NO: 2987 - RNA, 22 nt, Artificial Sequence
  Synthesized RNAi sequence
ugauuccuuaaaacguuuagcu

SEQ ID NO: 2988 - RNA, 22 nt, Artificial Sequence
  Synthesized RNAi sequence
ugcacaaaucguuucaguuggu

SEQ ID NO: 2989 - RNA, 22 nt, Artificial Sequence
  Synthesized RNAi sequence
ugccacgcuugacuagauugua

SEQ ID NO: 2990 - RNA, 22 nt, Artificial Sequence
  Synthesized RNAi sequence
ugcgcuuagcccaaagcucaaa

SEQ ID NO: 2991 - RNA, 22 nt, Artificial Sequence
  Synthesized RNAi sequence
ugcuacauuaacagguaauguu

SEQ ID NO: 2992 - RNA, 22 nt, Artificial Sequence
  Synthesized RNAi sequence
ugcuggagcaucucuuuuguag

SEQ ID NO: 2993 - RNA, 22 nt, Artificial Sequence
  Synthesized RNAi sequence
uggacaacaccaucaacuuucu

SEQ ID NO: 2994 - RNA, 22 nt, Artificial Sequence
  Synthesized RNAi sequence
uggagcaucucuuuuguagucc

SEQ ID NO: 2995 - RNA, 22 nt, Artificial Sequence
  Synthesized RNAi sequence
uggccaucuuuacaccaaagca

SEQ ID NO: 2996 - RNA, 22 nt, Artificial Sequence
  Synthesized RNAi sequence
uggcuaugucagucauagaaca

SEQ ID NO: 2997 - RNA, 22 nt, Artificial Sequence
  Synthesized RNAi sequence
ugggaccuacagaugguuguaa

SEQ ID NO: 2998 - RNA, 22 nt, Artificial Sequence
  Synthesized RNAi sequence
uggguaaaauguuucuacaugg

SEQ ID NO: 2999 - RNA, 22 nt, Artificial Sequence
  Synthesized RNAi sequence
uggguuuaaauucuuguaaauu

SEQ ID NO: 3000 - RNA, 22 nt, Artificial Sequence
  Synthesized RNAi sequence
ugguacugguuuaauguugcgc

SEQ ID NO: 3001 - RNA, 22 nt, Artificial Sequence
  Synthesized RNAi sequence
ugguacuucacccuguugucca

SEQ ID NO: 3002 - RNA, 22 nt, Artificial Sequence
  Synthesized RNAi sequence
ugguuguaaaccuuuaacacua

SEQ ID NO: 3003 - RNA, 22 nt, Artificial Sequence
  Synthesized RNAi sequence
ugguuuaauguugcgcuuagcc

SEQ ID NO: 3004 - RNA, 22 nt, Artificial Sequence
  Synthesized RNAi sequence
ugguuucuuggcuaugucaguc

SEQ ID NO: 3005 - RNA, 22 nt, Artificial Sequence
  Synthesized RNAi sequence
uguaaaccaccuaacugacuau

SEQ ID NO: 3006 - RNA, 22 nt, Artificial Sequence
  Synthesized RNAi sequence
uguaaauuucuacucugaguaa

SEQ ID NO: 3007 - RNA, 22 nt, Artificial Sequence
  Synthesized RNAi sequence
uguaauaagaacaccauuacgg

SEQ ID NO: 3008 - RNA, 22 nt, Artificial Sequence
  Synthesized RNAi sequence
uguaauuuuggguaaaauguuu

SEQ ID NO: 3009 - RNA, 22 nt, Artificial Sequence
  Synthesized RNAi sequence
uguagucccagaucacaguauu

SEQ ID NO: 3010 - RNA, 22 nt, Artificial Sequence
  Synthesized RNAi sequence
uguauagucaauagucacuuug

SEQ ID NO: 3011 - RNA, 22 nt, Artificial Sequence
  Synthesized RNAi sequence
ugucagucauagaacaaacacc

SEQ ID NO: 3012 - RNA, 22 nt, Artificial Sequence
  Synthesized RNAi sequence
uguccacacccaaauuauugag

SEQ ID NO: 3013 - RNA, 22 nt, Artificial Sequence
  Synthesized RNAi sequence
ugucccuuauuuacaacauuaa

SEQ ID NO: 3014 - RNA, 22 nt, Artificial Sequence
  Synthesized RNAi sequence
ugugacuccauuaagacuagcu

SEQ ID NO: 3015 - RNA, 22 nt, Artificial Sequence
  Synthesized RNAi sequence
uguguaaacaguguuauuaaug

SEQ ID NO: 3016 - RNA, 22 nt, Artificial Sequence
  Synthesized RNAi sequence
uguuauuaaugauagaaacugg

SEQ ID NO: 3017 - RNA, 22 nt, Artificial Sequence
  Synthesized RNAi sequence
uguucgaaggcauagccuucua

SEQ ID NO: 3018 - RNA, 22 nt, Artificial Sequence
  Synthesized RNAi sequence
uguugcgcuuagcccaaagcuc

SEQ ID NO: 3019 - RNA, 22 nt, Artificial Sequence
  Synthesized RNAi sequence
uguuggacaacaccaucaacuu

SEQ ID NO: 3020 - RNA, 22 nt, Artificial Sequence
  Synthesized RNAi sequence
uguuguccaucaaagugucccu

SEQ ID NO: 3021 - RNA, 22 nt, Artificial Sequence
  Synthesized RNAi sequence
uguuucuacauggccaucuuua

SEQ ID NO: 3022 - RNA, 22 nt, Artificial Sequence
  Synthesized RNAi sequence
uguuuuauuuucaaacaauucu

SEQ ID NO: 3023 - RNA, 22 nt, Artificial Sequence
  Synthesized RNAi sequence
uuaaaacguuuagcuaguccaa

SEQ ID NO: 3024 - RNA, 22 nt, Artificial Sequence
  Synthesized RNAi sequence
uuaaauucuuguaaauuucuac

SEQ ID NO: 3025 - RNA, 22 nt, Artificial Sequence
  Synthesized RNAi sequence
uuaacacuaccuucuguaauaa

SEQ ID NO: 3026 - RNA, 22 nt, Artificial Sequence
  Synthesized RNAi sequence
uuaacagguaauguuguuuuau

SEQ ID NO: 3027 - RNA, 22 nt, Artificial Sequence
  Synthesized RNAi sequence
uuaagacuagcuuguuugggac

SEQ ID NO: 3028 - RNA, 22 nt, Artificial Sequence
  Synthesized RNAi sequence
uuaaugauagaaacugguacuu

SEQ ID NO: 3029 - RNA, 22 nt, Artificial Sequence
  Synthesized RNAi sequence
uuaaugugacuccauuaagacu

SEQ ID NO: 3030 - RNA, 22 nt, Artificial Sequence
  Synthesized RNAi sequence
uuaauguugcgcuuagcccaaa

SEQ ID NO: 3031 - RNA, 22 nt, Artificial Sequence
  Synthesized RNAi sequence
uuacaccaaagcauaaaugaaa

SEQ ID NO: 3032 - RNA, 22 nt, Artificial Sequence
  Synthesized RNAi sequence
uuacgggcauuucuaaauaagu

SEQ ID NO: 3033 - RNA, 22 nt, Artificial Sequence
  Synthesized RNAi sequence
uuagaugaaccuguuugcgcau

SEQ ID NO: 3034 - RNA, 22 nt, Artificial Sequence
  Synthesized RNAi sequence
uuagcagcaauguccacaccca

SEQ ID NO: 3035 - RNA, 22 nt, Artificial Sequence
  Synthesized RNAi sequence
uuagcccaaagcucaaaugcua

SEQ ID NO: 3036 - RNA, 22 nt, Artificial Sequence
  Synthesized RNAi sequence
uuagcuaguccaaucaguagau

SEQ ID NO: 3037 - RNA, 22 nt, Artificial Sequence
  Synthesized RNAi sequence
uuauuaaugauagaaacuggua

SEQ ID NO: 3038 - RNA, 22 nt, Artificial Sequence
  Synthesized RNAi sequence
uuauuauuucaacaaaaucauc

SEQ ID NO: 3039 - RNA, 22 nt, Artificial Sequence
  Synthesized RNAi sequence
uuauugaguauuuucaccucug

SEQ ID NO: 3040 - RNA, 22 nt, Artificial Sequence
  Synthesized RNAi sequence
uuauuucaacaaaaucaucaag

SEQ ID NO: 3041 - RNA, 22 nt, Artificial Sequence
  Synthesized RNAi sequence
uuauuuucaaacaauucuacau

SEQ ID NO: 3042 - RNA, 22 nt, Artificial Sequence
  Synthesized RNAi sequence
uucaaaaggugauuccuuaaaa

SEQ ID NO: 3043 - RNA, 22 nt, Artificial Sequence
  Synthesized RNAi sequence
uucaaacaauucuacaucaaca

SEQ ID NO: 3044 - RNA, 22 nt, Artificial Sequence
  Synthesized RNAi sequence
uucaacaaaaucaucaaguaau

SEQ ID NO: 3045 - RNA, 22 nt, Artificial Sequence
  Synthesized RNAi sequence
uucacccuguuguccaucaaag

SEQ ID NO: 3046 - RNA, 22 nt, Artificial Sequence
  Synthesized RNAi sequence
uucaccucugguacugguuuaa

SEQ ID NO: 3047 - RNA, 22 nt, Artificial Sequence
  Synthesized RNAi sequence
uucagguaauuguuggacaaca

SEQ ID NO: 3048 - RNA, 22 nt, Artificial Sequence
  Synthesized RNAi sequence
uucaguugguuucuuggcuaug

SEQ ID NO: 3049 - RNA, 22 nt, Artificial Sequence
  Synthesized RNAi sequence
uuccauuugacuccuggguuua

SEQ ID NO: 3050 - RNA, 22 nt, Artificial Sequence
  Synthesized RNAi sequence
uucgaaggcauagccuucuaau

SEQ ID NO: 3051 - RNA, 22 nt, Artificial Sequence
  Synthesized RNAi sequence
uucuaaauaagucuacuugacc

SEQ ID NO: 3052 - RNA, 22 nt, Artificial Sequence
  Synthesized RNAi sequence
uucuaagaaaucaauuuccauu

SEQ ID NO: 3053 - RNA, 22 nt, Artificial Sequence
  Synthesized RNAi sequence
uucuaauucaaaaggugauucc

SEQ ID NO: 3054 - RNA, 22 nt, Artificial Sequence
  Synthesized RNAi sequence
uucuacaucaacaccaucaacu

SEQ ID NO: 3055 - RNA, 22 nt, Artificial Sequence
  Synthesized RNAi sequence
uucuacauggccaucuuuacac

SEQ ID NO: 3056 - RNA, 22 nt, Artificial Sequence
  Synthesized RNAi sequence
uucuacucugaguaaaguaagu

SEQ ID NO: 3057 - RNA, 22 nt, Artificial Sequence
  Synthesized RNAi sequence
uucuguaauaagaacaccauua

SEQ ID NO: 3058 - RNA, 22 nt, Artificial Sequence
  Synthesized RNAi sequence
uucuguauagucaauagucacu

SEQ ID NO: 3059 - RNA, 22 nt, Artificial Sequence
  Synthesized RNAi sequence
uucuuggcuaugucagucauag

SEQ ID NO: 3060 - RNA, 22 nt, Artificial Sequence
  Synthesized RNAi sequence
uucuuguaaauuucuacucuga

SEQ ID NO: 3061 - RNA, 22 nt, Artificial Sequence
  Synthesized RNAi sequence
uugacaaccuuagaaacuacag

SEQ ID NO: 3062 - RNA, 22 nt, Artificial Sequence
  Synthesized RNAi sequence
uugacuagauuguaauuuuggg

SEQ ID NO: 3063 - RNA, 22 nt, Artificial Sequence
  Synthesized RNAi sequence
uugacuccuggguuuaaauucu

SEQ ID NO: 3064 - RNA, 22 nt, Artificial Sequence
  Synthesized RNAi sequence
uugaguauuuucaccucuggua

SEQ ID NO: 3065 - RNA, 22 nt, Artificial Sequence
  Synthesized RNAi sequence
uugcgcuuagcccaaagcucaa

SEQ ID NO: 3066 - RNA, 22 nt, Artificial Sequence
  Synthesized RNAi sequence
uuggcuaugucagucauagaac

SEQ ID NO: 3067 - RNA, 22 nt, Artificial Sequence
  Synthesized RNAi sequence
uugggaccuacagaugguugua

SEQ ID NO: 3068 - RNA, 22 nt, Artificial Sequence
  Synthesized RNAi sequence
uugggauuuuauuauuucaaca

SEQ ID NO: 3069 - RNA, 22 nt, Artificial Sequence
  Synthesized RNAi sequence
uuggguaaaauguuucuacaug

SEQ ID NO: 3070 - RNA, 22 nt, Artificial Sequence
  Synthesized RNAi sequence
uugguuucuuggcuaugucagu

SEQ ID NO: 3071 - RNA, 22 nt, Artificial Sequence
  Synthesized RNAi sequence
uuguaaaccuuuaacacuaccu

SEQ ID NO: 3072 - RNA, 22 nt, Artificial Sequence
  Synthesized RNAi sequence
uuguaaauuucuacucugagua

SEQ ID NO: 3073 - RNA, 22 nt, Artificial Sequence
  Synthesized RNAi sequence
uuguaauuuuggguaaaauguu

SEQ ID NO: 3074 - RNA, 22 nt, Artificial Sequence
  Synthesized RNAi sequence
uuguagucccagaucacaguau

SEQ ID NO: 3075 - RNA, 22 nt, Artificial Sequence
  Synthesized RNAi sequence
uuguccaucaaagugucccuua

SEQ ID NO: 3076 - RNA, 22 nt, Artificial Sequence
  Synthesized RNAi sequence
uuguguaaacaguguuauuaau

SEQ ID NO: 3077 - RNA, 22 nt, Artificial Sequence
  Synthesized RNAi sequence
uuguuggacaacaccaucaacu

SEQ ID NO: 3078 - RNA, 22 nt, Artificial Sequence
  Synthesized RNAi sequence
uuguuugggaccuacagauggu

SEQ ID NO: 3079 - RNA, 22 nt, Artificial Sequence
  Synthesized RNAi sequence
uuguuuuauuuucaaacaauuc

SEQ ID NO: 3080 - RNA, 22 nt, Artificial Sequence
  Synthesized RNAi sequence
uuuaacacuaccuucuguaaua

SEQ ID NO: 3081 - RNA, 22 nt, Artificial Sequence
  Synthesized RNAi sequence
uuuaauguugcgcuuagcccaa

SEQ ID NO: 3082 - RNA, 22 nt, Artificial Sequence
  Synthesized RNAi sequence
uuuacaccaaagcauaaaugaa

SEQ ID NO: 3083 - RNA, 22 nt, Artificial Sequence
  Synthesized RNAi sequence
uuuagcuaguccaaucaguaga

SEQ ID NO: 3084 - RNA, 22 nt, Artificial Sequence
  Synthesized RNAi sequence
uuuauuuucaaacaauucuaca

SEQ ID NO: 3085 - RNA, 22 nt, Artificial Sequence
  Synthesized RNAi sequence
uuucaaacaauucuacaucaac

SEQ ID NO: 3086 - RNA, 22 nt, Artificial Sequence
  Synthesized RNAi sequence
uuucaccucugguacugguuua

SEQ ID NO: 3087 - RNA, 22 nt, Artificial Sequence
  Synthesized RNAi sequence
uuucagguaauuguuggacaac

SEQ ID NO: 3088 - RNA, 22 nt, Artificial Sequence
  Synthesized RNAi sequence
uuucaguugguuucuuggcuau

SEQ ID NO: 3089 - RNA, 22 nt, Artificial Sequence
  Synthesized RNAi sequence
uuuccauuugacuccuggguuu

SEQ ID NO: 3090 - RNA, 22 nt, Artificial Sequence
  Synthesized RNAi sequence
uuucuaaauaagucuacuugac

SEQ ID NO: 3091 - RNA, 22 nt, Artificial Sequence
  Synthesized RNAi sequence
uuucuacauggccaucuuuaca

SEQ ID NO: 3092 - RNA, 22 nt, Artificial Sequence
  Synthesized RNAi sequence
uuucuacucugaguaaaguaag

SEQ ID NO: 3093 - RNA, 22 nt, Artificial Sequence
  Synthesized RNAi sequence
uuucuguauagucaauagucac

SEQ ID NO: 3094 - RNA, 22 nt, Artificial Sequence
  Synthesized RNAi sequence
uuucuuggcuaugucagucaua

SEQ ID NO: 3095 - RNA, 22 nt, Artificial Sequence
  Synthesized RNAi sequence
uuugacaaccuuagaaacuaca

SEQ ID NO: 3096 - RNA, 22 nt, Artificial Sequence
  Synthesized RNAi sequence
uuugacuccuggguuuaaauuc

SEQ ID NO: 3097 - RNA, 22 nt, Artificial Sequence
  Synthesized RNAi sequence
uuugggaccuacagaugguugu

SEQ ID NO: 3098 - RNA, 22 nt, Artificial Sequence
  Synthesized RNAi sequence
uuuguagucccagaucacagua

SEQ ID NO: 3099 - RNA, 22 nt, Artificial Sequence
  Synthesized RNAi sequence
uuuguguaaacaguguuauuaa

SEQ ID NO: 3100 - RNA, 22 nt, Artificial Sequence
  Synthesized RNAi sequence
uuuuauuuucaaacaauucuac

SEQ ID NO: 3101 - RNA, 22 nt, Artificial Sequence
  Synthesized RNAi sequence
uuuucaaacaauucuacaucaa

SEQ ID NO: 3102 - RNA, 22 nt, Artificial Sequence
  Synthesized RNAi sequence
uuuucaccucugguacugguuu

SEQ ID NO: 3103 - RNA, 22 nt, Artificial Sequence
  Synthesized RNAi sequence
uuuuggguaaaauguuucuaca

SEQ ID NO: 3104 - RNA, 22 nt, Artificial Sequence
  Synthesized RNAi sequence
uuuuguagucccagaucacagu

SEQ ID NO: 3105 - RNA, 22 nt, Artificial Sequence
  Synthesized RNAi sequence
uuuuguguaaacaguguuauua

SEQ ID NO: 3106 - RNA, 22 nt, Artificial Sequence
  Synthesized RNAi sequence
aaacacucuacacgagcacgug

SEQ ID NO: 3107 - RNA, 22 nt, Artificial Sequence
  Synthesized RNAi sequence
aaacauacggauuaacagacaa

SEQ ID NO: 3108 - RNA, 22 nt, Artificial Sequence
  Synthesized RNAi sequence
aaacaucaugcgugauaacacc

SEQ ID NO: 3109 - RNA, 22 nt, Artificial Sequence
  Synthesized RNAi sequence
aaacauuuuaaagcauugagcu

SEQ ID NO: 3110 - RNA, 22 nt, Artificial Sequence
  Synthesized RNAi sequence
aaaccaaagcacucacaguguc

SEQ ID NO: 3111 - RNA, 22 nt, Artificial Sequence
  Synthesized RNAi sequence
aaacuaaugggugguuuaugug

SEQ ID NO: 3112 - RNA, 22 nt, Artificial Sequence
  Synthesized RNAi sequence
aaacucaucugagauauugagu

SEQ ID NO: 3113 - RNA, 22 nt, Artificial Sequence
  Synthesized RNAi sequence
aaagacaacuauaucugcuguc

SEQ ID NO: 3114 - RNA, 22 nt, Artificial Sequence
  Synthesized RNAi sequence
aaagacagcuuuucuccaagca

SEQ ID NO: 3115 - RNA, 22 nt, Artificial Sequence
  Synthesized RNAi sequence
aaagacauaauuucgguuaagu

SEQ ID NO: 3116 - RNA, 22 nt, Artificial Sequence
  Synthesized RNAi sequence
aaagaguccuguuacauuuuca

SEQ ID NO: 3117 - RNA, 22 nt, Artificial Sequence
  Synthesized RNAi sequence
aaagauguaauucucugucaga

SEQ ID NO: 3118 - RNA, 22 nt, Artificial Sequence
  Synthesized RNAi sequence
aaagcacucacagugucaacaa

SEQ ID NO: 3119 - RNA, 22 nt, Artificial Sequence
  Synthesized RNAi sequence
aaagcauugagcugauuugucu

SEQ ID NO: 3120 - RNA, 22 nt, Artificial Sequence
  Synthesized RNAi sequence
aaaggucucuaucagacauuau

SEQ ID NO: 3121 - RNA, 22 nt, Artificial Sequence
  Synthesized RNAi sequence
aaaguaugccuacuuuugcucu

SEQ ID NO: 3122 - RNA, 22 nt, Artificial Sequence
  Synthesized RNAi sequence
aaaguugagucacaucugugac

SEQ ID NO: 3123 - RNA, 22 nt, Artificial Sequence
  Synthesized RNAi sequence
aaaguugccacauuccuacgug

SEQ ID NO: 3124 - RNA, 22 nt, Artificial Sequence
  Synthesized RNAi sequence
aaauaaagacagcuuuucucca

SEQ ID NO: 3125 - RNA, 22 nt, Artificial Sequence
  Synthesized RNAi sequence
aaauaaucaccaacauuuaauu

SEQ ID NO: 3126 - RNA, 22 nt, Artificial Sequence
  Synthesized RNAi sequence
aaauauucugguucuagugugc

SEQ ID NO: 3127 - RNA, 22 nt, Artificial Sequence
  Synthesized RNAi sequence
aaauauuuuaaugccuucucac

SEQ ID NO: 3128 - RNA, 22 nt, Artificial Sequence
  Synthesized RNAi sequence
aaaucauaauuuguggccauug

SEQ ID NO: 3129 - RNA, 22 nt, Artificial Sequence
  Synthesized RNAi sequence
aaaucuguuuacauuacaagag

SEQ ID NO: 3130 - RNA, 22 nt, Artificial Sequence
  Synthesized RNAi sequence
aaaucuuugaggcuacagcauu

SEQ ID NO: 3131 - RNA, 22 nt, Artificial Sequence
  Synthesized RNAi sequence
aaaugacucuuaccaguaccag

SEQ ID NO: 3132 - RNA, 22 nt, Artificial Sequence
  Synthesized RNAi sequence
aaauguaaucaccagcauuugu

SEQ ID NO: 3133 - RNA, 22 nt, Artificial Sequence
  Synthesized RNAi sequence
aaaugucuccucaguagcuuug

SEQ ID NO: 3134 - RNA, 22 nt, Artificial Sequence
  Synthesized RNAi sequence
aaauugcaacuugucauaaagg

SEQ ID NO: 3135 - RNA, 22 nt, Artificial Sequence
  Synthesized RNAi sequence
aaauuucaucaaagacaacuau

SEQ ID NO: 3136 - RNA, 22 nt, Artificial Sequence
  Synthesized RNAi sequence
aacaauuucagcaggacaacgc

SEQ ID NO: 3137 - RNA, 22 nt, Artificial Sequence
  Synthesized RNAi sequence
aacacccuuauaaaacauuuua

SEQ ID NO: 3138 - RNA, 22 nt, Artificial Sequence
  Synthesized RNAi sequence
aacacucaaaucauaauuugug

SEQ ID NO: 3139 - RNA, 22 nt, Artificial Sequence
  Synthesized RNAi sequence
aacacucuacacgagcacgugc

SEQ ID NO: 3140 - RNA, 22 nt, Artificial Sequence
  Synthesized RNAi sequence
aacagcauuuacaacauaagaa

SEQ ID NO: 3141 - RNA, 22 nt, Artificial Sequence
  Synthesized RNAi sequence
aacagcggcaugagagcaagcu

SEQ ID NO: 3142 - RNA, 22 nt, Artificial Sequence
  Synthesized RNAi sequence
aacaguuugaguugguaguccc

SEQ ID NO: 3143 - RNA, 22 nt, Artificial Sequence
  Synthesized RNAi sequence
aacauaagaauggucuacguau

SEQ ID NO: 3144 - RNA, 22 nt, Artificial Sequence
  Synthesized RNAi sequence
aacauacggauuaacagacaag

SEQ ID NO: 3145 - RNA, 22 nt, Artificial Sequence
  Synthesized RNAi sequence
aacauagugcucuuguggcacu

SEQ ID NO: 3146 - RNA, 22 nt, Artificial Sequence
  Synthesized RNAi sequence
aacaucaugcgugauaacaccc

SEQ ID NO: 3147 - RNA, 22 nt, Artificial Sequence
  Synthesized RNAi sequence
aacauugcuagaaaacucaucu

SEQ ID NO: 3148 - RNA, 22 nt, Artificial Sequence
  Synthesized RNAi sequence
aacauuuaauuuguaaguuguu

SEQ ID NO: 3149 - RNA, 22 nt, Artificial Sequence
  Synthesized RNAi sequence
aacauuuuaaagcauugagcug

SEQ ID NO: 3150 - RNA, 22 nt, Artificial Sequence
  Synthesized RNAi sequence
aaccaaagcacucacaguguca

SEQ ID NO: 3151 - RNA, 22 nt, Artificial Sequence
  Synthesized RNAi sequence
aaccaguaaagacauaauuucg

SEQ ID NO: 3152 - RNA, 22 nt, Artificial Sequence
  Synthesized RNAi sequence
aaccuggagcauugcaaacaua

SEQ ID NO: 3153 - RNA, 22 nt, Artificial Sequence
  Synthesized RNAi sequence
aaccuuuugauaauuugcaaca

SEQ ID NO: 3154 - RNA, 22 nt, Artificial Sequence
  Synthesized RNAi sequence
aacgccgacaaguuccgaggaa

SEQ ID NO: 3155 - RNA, 22 nt, Artificial Sequence
  Synthesized RNAi sequence
aacuaaugggugguuuauguga

SEQ ID NO: 3156 - RNA, 22 nt, Artificial Sequence
  Synthesized RNAi sequence
aacuauaucugcugucgucuca

SEQ ID NO: 3157 - RNA, 22 nt, Artificial Sequence
  Synthesized RNAi sequence
aacucaucugagauauugagug

SEQ ID NO: 3158 - RNA, 22 nt, Artificial Sequence
  Synthesized RNAi sequence
aacuucccaugaaagauguaau

SEQ ID NO: 3159 - RNA, 22 nt, Artificial Sequence
  Synthesized RNAi sequence
aacuugucauaaaggucucuau

SEQ ID NO: 3160 - RNA, 22 nt, Artificial Sequence
  Synthesized RNAi sequence
aagaauggucuacguaugcaag

SEQ ID NO: 3161 - RNA, 22 nt, Artificial Sequence
  Synthesized RNAi sequence
aagacaacuauaucugcugucg

SEQ ID NO: 3162 - RNA, 22 nt, Artificial Sequence
  Synthesized RNAi sequence
aagacagcuuuucuccaagcag

SEQ ID NO: 3163 - RNA, 22 nt, Artificial Sequence
  Synthesized RNAi sequence
aagacauaauuucgguuaagug

SEQ ID NO: 3164 - RNA, 22 nt, Artificial Sequence
  Synthesized RNAi sequence
aagacuaauuuaugugauguug

SEQ ID NO: 3165 - RNA, 22 nt, Artificial Sequence
  Synthesized RNAi sequence
aagacuuguaaauugcaacuug

SEQ ID NO: 3166 - RNA, 22 nt, Artificial Sequence
  Synthesized RNAi sequence
aagaguccuguuacauuuucag

SEQ ID NO: 3167 - RNA, 22 nt, Artificial Sequence
  Synthesized RNAi sequence
aagagugagcuguuucaguggu

SEQ ID NO: 3168 - RNA, 22 nt, Artificial Sequence
  Synthesized RNAi sequence
aagauguaauucucugucagac

SEQ ID NO: 3169 - RNA, 22 nt, Artificial Sequence
  Synthesized RNAi sequence
aagcaccacaucuuaaugaagu

SEQ ID NO: 3170 - RNA, 22 nt, Artificial Sequence
  Synthesized RNAi sequence
aagcauugagcugauuugucuu

SEQ ID NO: 3171 - RNA, 22 nt, Artificial Sequence
  Synthesized RNAi sequence
aagccaguaauucuaacauagu

SEQ ID NO: 3172 - RNA, 22 nt, Artificial Sequence
  Synthesized RNAi sequence
aagcuguauacacuaugcgagc

SEQ ID NO: 3173 - RNA, 22 nt, Artificial Sequence
  Synthesized RNAi sequence
aagcuuauuaucauaaaccaaa

SEQ ID NO: 3174 - RNA, 22 nt, Artificial Sequence
  Synthesized RNAi sequence
aaggguaguagagagcuaggcc

SEQ ID NO: 3175 - RNA, 22 nt, Artificial Sequence
  Synthesized RNAi sequence
aaggucucuaucagacauuaug

SEQ ID NO: 3176 - RNA, 22 nt, Artificial Sequence
  Synthesized RNAi sequence
aaggugaaauaaagacagcuuu

SEQ ID NO: 3177 - RNA, 22 nt, Artificial Sequence
  Synthesized RNAi sequence
aaguaaaguugagucacaucug

SEQ ID NO: 3178 - RNA, 22 nt, Artificial Sequence
  Synthesized RNAi sequence
aaguaugccuacuuuugcucug

SEQ ID NO: 3179 - RNA, 22 nt, Artificial Sequence
  Synthesized RNAi sequence
aagucuacacacugaauugaaa

SEQ ID NO: 3180 - RNA, 22 nt, Artificial Sequence
  Synthesized RNAi sequence
aagucugugaauugcaaagaac

SEQ ID NO: 3181 - RNA, 22 nt, Artificial Sequence
  Synthesized RNAi sequence
aagugguggucuagguuuacca

SEQ ID NO: 3182 - RNA, 22 nt, Artificial Sequence
  Synthesized RNAi sequence
aaguuccgaggaacaugucugg

SEQ ID NO: 3183 - RNA, 22 nt, Artificial Sequence
  Synthesized RNAi sequence
aaguugagucacaucugugaca

SEQ ID NO: 3184 - RNA, 22 nt, Artificial Sequence
  Synthesized RNAi sequence
aaguugccacauuccuacgugg

SEQ ID NO: 3185 - RNA, 22 nt, Artificial Sequence
  Synthesized RNAi sequence
aaguuguuguaccucgguaaac

SEQ ID NO: 3186 - RNA, 22 nt, Artificial Sequence
  Synthesized RNAi sequence
aauaaagacagcuuuucuccaa

SEQ ID NO: 3187 - RNA, 22 nt, Artificial Sequence
  Synthesized RNAi sequence
aauaauagcucauaccuccuaa

SEQ ID NO: 3188 - RNA, 22 nt, Artificial Sequence
  Synthesized RNAi sequence
aauaaucaccaacauuuaauuu

SEQ ID NO: 3189 - RNA, 22 nt, Artificial Sequence
  Synthesized RNAi sequence
aauaccauaagacaguuuaaau

SEQ ID NO: 3190 - RNA, 22 nt, Artificial Sequence
  Synthesized RNAi sequence
aauacuuuugcauaccaaccuu

SEQ ID NO: 3191 - RNA, 22 nt, Artificial Sequence
  Synthesized RNAi sequence
aauagcaaaaugacucuuacca

SEQ ID NO: 3192 - RNA, 22 nt, Artificial Sequence
  Synthesized RNAi sequence
aauagcaacauuaaaucuguuu

SEQ ID NO: 3193 - RNA, 22 nt, Artificial Sequence
  Synthesized RNAi sequence
aauagcucauaccuccuaagua

SEQ ID NO: 3194 - RNA, 22 nt, Artificial Sequence
  Synthesized RNAi sequence
aauauucugguucuagugugcc

SEQ ID NO: 3195 - RNA, 22 nt, Artificial Sequence
  Synthesized RNAi sequence
aauauuuuaaugccuucucaca

SEQ ID NO: 3196 - RNA, 22 nt, Artificial Sequence
  Synthesized RNAi sequence
aaucaacaguuugaguugguag

SEQ ID NO: 3197 - RNA, 22 nt, Artificial Sequence
  Synthesized RNAi sequence
aaucaccaacauuuaauuugua

SEQ ID NO: 3198 - RNA, 22 nt, Artificial Sequence
  Synthesized RNAi sequence
aaucauaauuuguggccauuga

SEQ ID NO: 3199 - RNA, 22 nt, Artificial Sequence
  Synthesized RNAi sequence
aaucuggcauugacaacacuca

SEQ ID NO: 3200 - RNA, 22 nt, Artificial Sequence
  Synthesized RNAi sequence
aaucuguuuacauuacaagagu

SEQ ID NO: 3201 - RNA, 22 nt, Artificial Sequence
  Synthesized RNAi sequence
aaucuuuaaagaguccuguuac

SEQ ID NO: 3202 - RNA, 22 nt, Artificial Sequence
  Synthesized RNAi sequence
aaucuuugaggcuacagcauuc

SEQ ID NO: 3203 - RNA, 22 nt, Artificial Sequence
  Synthesized RNAi sequence
aaugaagucugugaauugcaaa

SEQ ID NO: 3204 - RNA, 22 nt, Artificial Sequence
  Synthesized RNAi sequence
aaugacucuuaccaguaccagg

SEQ ID NO: 3205 - RNA, 22 nt, Artificial Sequence
  Synthesized RNAi sequence
aaugcauuuacaguacaaaaga

SEQ ID NO: 3206 - RNA, 22 nt, Artificial Sequence
  Synthesized RNAi sequence
aaugccuucucacauagugcau

SEQ ID NO: 3207 - RNA, 22 nt, Artificial Sequence
  Synthesized RNAi sequence
aauggaaaacuaaugggugguu

SEQ ID NO: 3208 - RNA, 22 nt, Artificial Sequence
  Synthesized RNAi sequence
aauggcauuacuguaugugaug

SEQ ID NO: 3209 - RNA, 22 nt, Artificial Sequence
  Synthesized RNAi sequence
aauggucuacguaugcaagcac

SEQ ID NO: 3210 - RNA, 22 nt, Artificial Sequence
  Synthesized RNAi sequence
aauguaaucaccagcauuuguc

SEQ ID NO: 3211 - RNA, 22 nt, Artificial Sequence
  Synthesized RNAi sequence
aauguacacauagugcuuagca

SEQ ID NO: 3212 - RNA, 22 nt, Artificial Sequence
  Synthesized RNAi sequence
aaugucuccucaguagcuuuga

SEQ ID NO: 3213 - RNA, 22 nt, Artificial Sequence
  Synthesized RNAi sequence
aaugugcguggugcagguaauu

SEQ ID NO: 3214 - RNA, 22 nt, Artificial Sequence
  Synthesized RNAi sequence
aauuauaaggugaaauaaagac

SEQ ID NO: 3215 - RNA, 22 nt, Artificial Sequence
  Synthesized RNAi sequence
aauucuacuacauuuaucuaua

SEQ ID NO: 3216 - RNA, 22 nt, Artificial Sequence
  Synthesized RNAi sequence
aauucucugucagacagcacuu

SEQ ID NO: 3217 - RNA, 22 nt, Artificial Sequence
  Synthesized RNAi sequence
aauugaaauauucugguucuag

SEQ ID NO: 3218 - RNA, 22 nt, Artificial Sequence
  Synthesized RNAi sequence
aauugagcagggucgccaaugu

SEQ ID NO: 3219 - RNA, 22 nt, Artificial Sequence
  Synthesized RNAi sequence
aauugcaacuugucauaaaggu

SEQ ID NO: 3220 - RNA, 22 nt, Artificial Sequence
  Synthesized RNAi sequence
aauugcagaugaaacaucaugc

SEQ ID NO: 3221 - RNA, 22 nt, Artificial Sequence
  Synthesized RNAi sequence
aauuuaugugauguugauauga

SEQ ID NO: 3222 - RNA, 22 nt, Artificial Sequence
  Synthesized RNAi sequence
aauuucaagacuuguaaauugc

SEQ ID NO: 3223 - RNA, 22 nt, Artificial Sequence
  Synthesized RNAi sequence
aauuucagcaggacaacgccga

SEQ ID NO: 3224 - RNA, 22 nt, Artificial Sequence
  Synthesized RNAi sequence
aauuucaucaaagacaacuaua

SEQ ID NO: 3225 - RNA, 22 nt, Artificial Sequence
  Synthesized RNAi sequence
aauuucgguuaagugguggucu

SEQ ID NO: 3226 - RNA, 22 nt, Artificial Sequence
  Synthesized RNAi sequence
aauuugcaacauugcuagaaaa

SEQ ID NO: 3227 - RNA, 22 nt, Artificial Sequence
  Synthesized RNAi sequence
aauuuguaaguuguuguaccuc

SEQ ID NO: 3228 - RNA, 22 nt, Artificial Sequence
  Synthesized RNAi sequence
aauuuguggccauugaaauuuc

SEQ ID NO: 3229 - RNA, 22 nt, Artificial Sequence
  Synthesized RNAi sequence
acaacauaagaauggucuacgu

SEQ ID NO: 3230 - RNA, 22 nt, Artificial Sequence
  Synthesized RNAi sequence
acaaccuggagcauugcaaaca

SEQ ID NO: 3231 - RNA, 22 nt, Artificial Sequence
  Synthesized RNAi sequence
acaacgccgacaaguuccgagg

SEQ ID NO: 3232 - RNA, 22 nt, Artificial Sequence
  Synthesized RNAi sequence
acaacuauaucugcugucgucu

SEQ ID NO: 3233 - RNA, 22 nt, Artificial Sequence
  Synthesized RNAi sequence
acaagacuaauuuaugugaugu

SEQ ID NO: 3234 - RNA, 22 nt, Artificial Sequence
  Synthesized RNAi sequence
acaagagugagcuguuucagug

SEQ ID NO: 3235 - RNA, 22 nt, Artificial Sequence
  Synthesized RNAi sequence
acaaguuccgaggaacaugucu

SEQ ID NO: 3236 - RNA, 22 nt, Artificial Sequence
  Synthesized RNAi sequence
acaauaauagcucauaccuccu

SEQ ID NO: 3237 - RNA, 22 nt, Artificial Sequence
  Synthesized RNAi sequence
acaaucuuuaaagaguccuguu

SEQ ID NO: 3238 - RNA, 22 nt, Artificial Sequence
  Synthesized RNAi sequence
acaauggaaaacuaaugggugg

SEQ ID NO: 3239 - RNA, 22 nt, Artificial Sequence
  Synthesized RNAi sequence
acaauuucagcaggacaacgcc

SEQ ID NO: 3240 - RNA, 22 nt, Artificial Sequence
  Synthesized RNAi sequence
acacaauggaaaacuaaugggu

SEQ ID NO: 3241 - RNA, 22 nt, Artificial Sequence
  Synthesized RNAi sequence
acacacugaauugaaauauucu

SEQ ID NO: 3242 - RNA, 22 nt, Artificial Sequence
  Synthesized RNAi sequence
acacauagugcuuagcacguaa

SEQ ID NO: 3243 - RNA, 22 nt, Artificial Sequence
  Synthesized RNAi sequence
acacccuuauaaaacauuuuaa

SEQ ID NO: 3244 - RNA, 22 nt, Artificial Sequence
  Synthesized RNAi sequence
acacgagcacgugcagguauaa

SEQ ID NO: 3245 - RNA, 22 nt, Artificial Sequence
  Synthesized RNAi sequence
acacuaugcgagcagaagggua

SEQ ID NO: 3246 - RNA, 22 nt, Artificial Sequence
  Synthesized RNAi sequence
acacucaaaucauaauuugugg

SEQ ID NO: 3247 - RNA, 22 nt, Artificial Sequence
  Synthesized RNAi sequence
acacucuacacgagcacgugca

SEQ ID NO: 3248 - RNA, 22 nt, Artificial Sequence
  Synthesized RNAi sequence
acacugaauugaaauauucugg

SEQ ID NO: 3249 - RNA, 22 nt, Artificial Sequence
  Synthesized RNAi sequence
acagacaagacuaauuuaugug

SEQ ID NO: 3250 - RNA, 22 nt, Artificial Sequence
  Synthesized RNAi sequence
acagcacuucacguacaguagc

SEQ ID NO: 3251 - RNA, 22 nt, Artificial Sequence
  Synthesized RNAi sequence
acagcauucugugaauuauaag

SEQ ID NO: 3252 - RNA, 22 nt, Artificial Sequence
  Synthesized RNAi sequence
acagcggcaugagagcaagcug

SEQ ID NO: 3253 - RNA, 22 nt, Artificial Sequence
  Synthesized RNAi sequence
acagcuuuucuccaagcagggu

SEQ ID NO: 3254 - RNA, 22 nt, Artificial Sequence
  Synthesized RNAi sequence
acagguguuagcuaaaauguaa

SEQ ID NO: 3255 - RNA, 22 nt, Artificial Sequence
  Synthesized RNAi sequence
acaguagcaauaccauaagaca

SEQ ID NO: 3256 - RNA, 22 nt, Artificial Sequence
  Synthesized RNAi sequence
acagugucaacaauuucagcag

SEQ ID NO: 3257 - RNA, 22 nt, Artificial Sequence
  Synthesized RNAi sequence
acaguuugaguugguaguccca

SEQ ID NO: 3258 - RNA, 22 nt, Artificial Sequence
  Synthesized RNAi sequence
acauaagaauggucuacguaug

SEQ ID NO: 3259 - RNA, 22 nt, Artificial Sequence
  Synthesized RNAi sequence
acauaauuucgguuaaguggug

SEQ ID NO: 3260 - RNA, 22 nt, Artificial Sequence
  Synthesized RNAi sequence
acauacggauuaacagacaaga

SEQ ID NO: 3261 - RNA, 22 nt, Artificial Sequence
  Synthesized RNAi sequence
acauagucauauucugagcccu

SEQ ID NO: 3262 - RNA, 22 nt, Artificial Sequence
  Synthesized RNAi sequence
acauagugcaucaacagcggca

SEQ ID NO: 3263 - RNA, 22 nt, Artificial Sequence
  Synthesized RNAi sequence
acauagugcucuuguggcacua

SEQ ID NO: 3264 - RNA, 22 nt, Artificial Sequence
  Synthesized RNAi sequence
acauagugcuuagcacguaauc

SEQ ID NO: 3265 - RNA, 22 nt, Artificial Sequence
  Synthesized RNAi sequence
acaucacaaccuggagcauugc

SEQ ID NO: 3266 - RNA, 22 nt, Artificial Sequence
  Synthesized RNAi sequence
acaucaugcgugauaacacccu

SEQ ID NO: 3267 - RNA, 22 nt, Artificial Sequence
  Synthesized RNAi sequence
acaucugugacaucacaaccug

SEQ ID NO: 3268 - RNA, 22 nt, Artificial Sequence
  Synthesized RNAi sequence
acaucuuaaugaagucugugaa

SEQ ID NO: 3269 - RNA, 22 nt, Artificial Sequence
  Synthesized RNAi sequence
acauggucguaacagcauuuac

SEQ ID NO: 3270 - RNA, 22 nt, Artificial Sequence
  Synthesized RNAi sequence
acauuaaaucuguuuacauuac

SEQ ID NO: 3271 - RNA, 22 nt, Artificial Sequence
  Synthesized RNAi sequence
acauuacaagagugagcuguuu

SEQ ID NO: 3272 - RNA, 22 nt, Artificial Sequence
  Synthesized RNAi sequence
acauuaugcaaaguaugccuac

SEQ ID NO: 3273 - RNA, 22 nt, Artificial Sequence
  Synthesized RNAi sequence
acauuccuacguggaauuucaa

SEQ ID NO: 3274 - RNA, 22 nt, Artificial Sequence
  Synthesized RNAi sequence
acauugcuagaaaacucaucug

SEQ ID NO: 3275 - RNA, 22 nt, Artificial Sequence
  Synthesized RNAi sequence
acauuuaauuuguaaguuguug

SEQ ID NO: 3276 - RNA, 22 nt, Artificial Sequence
  Synthesized RNAi sequence
acauuuaucuauaggcaaauau

SEQ ID NO: 3277 - RNA, 22 nt, Artificial Sequence
  Synthesized RNAi sequence
acauuuuaaagcauugagcuga

SEQ ID NO: 3278 - RNA, 22 nt, Artificial Sequence
  Synthesized RNAi sequence
acauuuucagcuuguaaaguug

SEQ ID NO: 3279 - RNA, 22 nt, Artificial Sequence
  Synthesized RNAi sequence
accaaagcacucacagugucaa

SEQ ID NO: 3280 - RNA, 22 nt, Artificial Sequence
  Synthesized RNAi sequence
accaacauuuaauuuguaaguu

SEQ ID NO: 3281 - RNA, 22 nt, Artificial Sequence
  Synthesized RNAi sequence
accaacuucccaugaaagaugu

SEQ ID NO: 3282 - RNA, 22 nt, Artificial Sequence
  Synthesized RNAi sequence
accacaucuuaaugaagucugu

SEQ ID NO: 3283 - RNA, 22 nt, Artificial Sequence
  Synthesized RNAi sequence
accagguggucccuggagugua

SEQ ID NO: 3284 - RNA, 22 nt, Artificial Sequence
  Synthesized RNAi sequence
accaguaaagacauaauuucgg

SEQ ID NO: 3285 - RNA, 22 nt, Artificial Sequence
  Synthesized RNAi sequence
accauaagacaguuuaaauguc

SEQ ID NO: 3286 - RNA, 22 nt, Artificial Sequence
  Synthesized RNAi sequence
acccuuauaaaacauuuuaaag

SEQ ID NO: 3287 - RNA, 22 nt, Artificial Sequence
  Synthesized RNAi sequence
accuauaguuuucauaagucua

SEQ ID NO: 3288 - RNA, 22 nt, Artificial Sequence
  Synthesized RNAi sequence
accuccuaaguaaaguugaguc

SEQ ID NO: 3289 - RNA, 22 nt, Artificial Sequence
  Synthesized RNAi sequence
accucgguaaacaacagcauca

SEQ ID NO: 3290 - RNA, 22 nt, Artificial Sequence
  Synthesized RNAi sequence
accuggagcauugcaaacauac

SEQ ID NO: 3291 - RNA, 22 nt, Artificial Sequence
  Synthesized RNAi sequence
accuuuugauaauuugcaacau

SEQ ID NO: 3292 - RNA, 22 nt, Artificial Sequence
  Synthesized RNAi sequence
acgagcacgugcagguauaauu

SEQ ID NO: 3293 - RNA, 22 nt, Artificial Sequence
  Synthesized RNAi sequence
acgccgacaaguuccgaggaac

SEQ ID NO: 3294 - RNA, 22 nt, Artificial Sequence
  Synthesized RNAi sequence
acggauuaacagacaagacuaa

SEQ ID NO: 3295 - RNA, 22 nt, Artificial Sequence
  Synthesized RNAi sequence
acguaaucuggcauugacaaca

SEQ ID NO: 3296 - RNA, 22 nt, Artificial Sequence
  Synthesized RNAi sequence
acguacaguagcaauaccauaa

SEQ ID NO: 3297 - RNA, 22 nt, Artificial Sequence
  Synthesized RNAi sequence
acguaugcaagcaccacaucuu

SEQ ID NO: 3298 - RNA, 22 nt, Artificial Sequence
  Synthesized RNAi sequence
acgugcagguauaauucuacua

SEQ ID NO: 3299 - RNA, 22 nt, Artificial Sequence
  Synthesized RNAi sequence
acguggaauuucaagacuugua

SEQ ID NO: 3300 - RNA, 22 nt, Artificial Sequence
  Synthesized RNAi sequence
acuaaugggugguuuaugugau

SEQ ID NO: 3301 - RNA, 22 nt, Artificial Sequence
  Synthesized RNAi sequence
acuaauuuaugugauguugaua

SEQ ID NO: 3302 - RNA, 22 nt, Artificial Sequence
  Synthesized RNAi sequence
acuacauuuaucuauaggcaaa

SEQ ID NO: 3303 - RNA, 22 nt, Artificial Sequence
  Synthesized RNAi sequence
acuaguguaggugcacuuaaug

SEQ ID NO: 3304 - RNA, 22 nt, Artificial Sequence
  Synthesized RNAi sequence
acuauaucugcugucgucucag

SEQ ID NO: 3305 - RNA, 22 nt, Artificial Sequence
  Synthesized RNAi sequence
acuaugcgagcagaaggguagu

SEQ ID NO: 3306 - RNA, 22 nt, Artificial Sequence
  Synthesized RNAi sequence
acucaaaucauaauuuguggcc

SEQ ID NO: 3307 - RNA, 22 nt, Artificial Sequence
  Synthesized RNAi sequence
acucacagugucaacaauuuca

SEQ ID NO: 3308 - RNA, 22 nt, Artificial Sequence
  Synthesized RNAi sequence
acucaucugagauauugagugu

SEQ ID NO: 3309 - RNA, 22 nt, Artificial Sequence
  Synthesized RNAi sequence
acucuacacgagcacgugcagg

SEQ ID NO: 3310 - RNA, 22 nt, Artificial Sequence
  Synthesized RNAi sequence
acucuuaccaguaccagguggu

SEQ ID NO: 3311 - RNA, 22 nt, Artificial Sequence
  Synthesized RNAi sequence
acugaauugaaauauucugguu

SEQ ID NO: 3312 - RNA, 22 nt, Artificial Sequence
  Synthesized RNAi sequence
acuguaugugaugucagcacaa

SEQ ID NO: 3313 - RNA, 22 nt, Artificial Sequence
  Synthesized RNAi sequence
acuuaauggcauuacuguaugu

SEQ ID NO: 3314 - RNA, 22 nt, Artificial Sequence
  Synthesized RNAi sequence
acuucacguacaguagcaauac

SEQ ID NO: 3315 - RNA, 22 nt, Artificial Sequence
  Synthesized RNAi sequence
acuucccaugaaagauguaauu

SEQ ID NO: 3316 - RNA, 22 nt, Artificial Sequence
  Synthesized RNAi sequence
acuuguaaauugcaacuuguca

SEQ ID NO: 3317 - RNA, 22 nt, Artificial Sequence
  Synthesized RNAi sequence
acuugucauaaaggucucuauc

SEQ ID NO: 3318 - RNA, 22 nt, Artificial Sequence
  Synthesized RNAi sequence
acuuuugcucugguaauagcaa

SEQ ID NO: 3319 - RNA, 22 nt, Artificial Sequence
  Synthesized RNAi sequence
agaaaacucaucugagauauug

SEQ ID NO: 3320 - RNA, 22 nt, Artificial Sequence
  Synthesized RNAi sequence
agaaggguaguagagagcuagg

SEQ ID NO: 3321 - RNA, 22 nt, Artificial Sequence
  Synthesized RNAi sequence
agaauacuuuugcauaccaacc

SEQ ID NO: 3322 - RNA, 22 nt, Artificial Sequence
  Synthesized RNAi sequence
agaauggucuacguaugcaagc

SEQ ID NO: 3323 - RNA, 22 nt, Artificial Sequence
  Synthesized RNAi sequence
agacaacuauaucugcugucgu

SEQ ID NO: 3324 - RNA, 22 nt, Artificial Sequence
  Synthesized RNAi sequence
agacaagacuaauuuaugugau

SEQ ID NO: 3325 - RNA, 22 nt, Artificial Sequence
  Synthesized RNAi sequence
agacagcacuucacguacagua

SEQ ID NO: 3326 - RNA, 22 nt, Artificial Sequence
  Synthesized RNAi sequence
agacagcuuuucuccaagcagg

SEQ ID NO: 3327 - RNA, 22 nt, Artificial Sequence
  Synthesized RNAi sequence
agacaguuuaaaugucuccuca

SEQ ID NO: 3328 - RNA, 22 nt, Artificial Sequence
  Synthesized RNAi sequence
agacauaauuucgguuaagugg

SEQ ID NO: 3329 - RNA, 22 nt, Artificial Sequence
  Synthesized RNAi sequence
agacauuaugcaaaguaugccu

SEQ ID NO: 3330 - RNA, 22 nt, Artificial Sequence
  Synthesized RNAi sequence
agacuaauuuaugugauguuga

SEQ ID NO: 3331 - RNA, 22 nt, Artificial Sequence
  Synthesized RNAi sequence
agacuuguaaauugcaacuugu

SEQ ID NO: 3332 - RNA, 22 nt, Artificial Sequence
  Synthesized RNAi sequence
agagagcuaggccaauagcaaa

SEQ ID NO: 3333 - RNA, 22 nt, Artificial Sequence
  Synthesized RNAi sequence
agagcaagcuguauacacuaug

SEQ ID NO: 3334 - RNA, 22 nt, Artificial Sequence
  Synthesized RNAi sequence
agagcuaggccaauagcaaaau

SEQ ID NO: 3335 - RNA, 22 nt, Artificial Sequence
  Synthesized RNAi sequence
agaguccuguuacauuuucagc

SEQ ID NO: 3336 - RNA, 22 nt, Artificial Sequence
  Synthesized RNAi sequence
agagugagcuguuucagugguu

SEQ ID NO: 3337 - RNA, 22 nt, Artificial Sequence
  Synthesized RNAi sequence
agauauugaguguuggguauaa

SEQ ID NO: 3338 - RNA, 22 nt, Artificial Sequence
  Synthesized RNAi sequence
agauguaauucucugucagaca

SEQ ID NO: 3339 - RNA, 22 nt, Artificial Sequence
  Synthesized RNAi sequence
agcaaaaugacucuuaccagua

SEQ ID NO: 3340 - RNA, 22 nt, Artificial Sequence
  Synthesized RNAi sequence
agcaacauuaaaucuguuuaca

SEQ ID NO: 3341 - RNA, 22 nt, Artificial Sequence
  Synthesized RNAi sequence
agcaagcuguauacacuaugcg

SEQ ID NO: 3342 - RNA, 22 nt, Artificial Sequence
  Synthesized RNAi sequence
agcaauaccauaagacaguuua

SEQ ID NO: 3343 - RNA, 22 nt, Artificial Sequence
  Synthesized RNAi sequence
agcaaugugcguggugcaggua

SEQ ID NO: 3344 - RNA, 22 nt, Artificial Sequence
  Synthesized RNAi sequence
agcacacaauggaaaacuaaug

SEQ ID NO: 3345 - RNA, 22 nt, Artificial Sequence
  Synthesized RNAi sequence
agcaccacaucuuaaugaaguc

SEQ ID NO: 3346 - RNA, 22 nt, Artificial Sequence
  Synthesized RNAi sequence
agcacguaaucuggcauugaca

SEQ ID NO: 3347 - RNA, 22 nt, Artificial Sequence
  Synthesized RNAi sequence
agcacgugcagguauaauucua

SEQ ID NO: 3348 - RNA, 22 nt, Artificial Sequence
  Synthesized RNAi sequence
agcacucacagugucaacaauu

SEQ ID NO: 3349 - RNA, 22 nt, Artificial Sequence
  Synthesized RNAi sequence
agcacuucacguacaguagcaa

SEQ ID NO: 3350 - RNA, 22 nt, Artificial Sequence
  Synthesized RNAi sequence
agcagaaggguaguagagagcu

SEQ ID NO: 3351 - RNA, 22 nt, Artificial Sequence
  Synthesized RNAi sequence
agcaggacaacgccgacaaguu

SEQ ID NO: 3352 - RNA, 22 nt, Artificial Sequence
  Synthesized RNAi sequence
agcagggucgccaauguacaca

SEQ ID NO: 3353 - RNA, 22 nt, Artificial Sequence
  Synthesized RNAi sequence
agcauucugugaauuauaaggu

SEQ ID NO: 3354 - RNA, 22 nt, Artificial Sequence
  Synthesized RNAi sequence
agcauugagcugauuugucuuu

SEQ ID NO: 3355 - RNA, 22 nt, Artificial Sequence
  Synthesized RNAi sequence
agcauugcaaacauacggauua

SEQ ID NO: 3356 - RNA, 22 nt, Artificial Sequence
  Synthesized RNAi sequence
agcauuuacaacauaagaaugg

SEQ ID NO: 3357 - RNA, 22 nt, Artificial Sequence
  Synthesized RNAi sequence
agccaguaauucuaacauagug

SEQ ID NO: 3358 - RNA, 22 nt, Artificial Sequence
  Synthesized RNAi sequence
agcggcaugagagcaagcugua

SEQ ID NO: 3359 - RNA, 22 nt, Artificial Sequence
  Synthesized RNAi sequence
agcuaaaauguaaucaccagca

SEQ ID NO: 3360 - RNA, 22 nt, Artificial Sequence
  Synthesized RNAi sequence
agcuaggccaauagcaaaauga

SEQ ID NO: 3361 - RNA, 22 nt, Artificial Sequence
  Synthesized RNAi sequence
agcucauaccuccuaaguaaag

SEQ ID NO: 3362 - RNA, 22 nt, Artificial Sequence
  Synthesized RNAi sequence
agcugauuugucuuuaugugcu

SEQ ID NO: 3363 - RNA, 22 nt, Artificial Sequence
  Synthesized RNAi sequence
agcuguauacacuaugcgagca

SEQ ID NO: 3364 - RNA, 22 nt, Artificial Sequence
  Synthesized RNAi sequence
agcuguuucagugguuugagug

SEQ ID NO: 3365 - RNA, 22 nt, Artificial Sequence
  Synthesized RNAi sequence
agcuuauuaucauaaaccaaag

SEQ ID NO: 3366 - RNA, 22 nt, Artificial Sequence
  Synthesized RNAi sequence
agcuuguaaaguugccacauuc

SEQ ID NO: 3367 - RNA, 22 nt, Artificial Sequence
  Synthesized RNAi sequence
aggaacaugucuggaccuauag

SEQ ID NO: 3368 - RNA, 22 nt, Artificial Sequence
  Synthesized RNAi sequence
aggacaacgccgacaaguuccg

SEQ ID NO: 3369 - RNA, 22 nt, Artificial Sequence
  Synthesized RNAi sequence
aggcaaauauuuuaaugccuuc

SEQ ID NO: 3370 - RNA, 22 nt, Artificial Sequence
  Synthesized RNAi sequence
aggcaaugcauuuacaguacaa

SEQ ID NO: 3371 - RNA, 22 nt, Artificial Sequence
  Synthesized RNAi sequence
aggccaauagcaaaaugacucu

SEQ ID NO: 3372 - RNA, 22 nt, Artificial Sequence
  Synthesized RNAi sequence
aggcuacagcauucugugaauu

SEQ ID NO: 3373 - RNA, 22 nt, Artificial Sequence
  Synthesized RNAi sequence
aggguaguagagagcuaggcca

SEQ ID NO: 3374 - RNA, 22 nt, Artificial Sequence
  Synthesized RNAi sequence
agggucgccaauguacacauag

SEQ ID NO: 3375 - RNA, 22 nt, Artificial Sequence
  Synthesized RNAi sequence
agguaauugagcagggucgcca

SEQ ID NO: 3376 - RNA, 22 nt, Artificial Sequence
  Synthesized RNAi sequence
agguauaauucuacuacauuua

SEQ ID NO: 3377 - RNA, 22 nt, Artificial Sequence
  Synthesized RNAi sequence
aggucucuaucagacauuaugc

SEQ ID NO: 3378 - RNA, 22 nt, Artificial Sequence
  Synthesized RNAi sequence
aggugcacuuaauggcauuacu

SEQ ID NO: 3379 - RNA, 22 nt, Artificial Sequence
  Synthesized RNAi sequence
agguggucccuggaguguagaa

SEQ ID NO: 3380 - RNA, 22 nt, Artificial Sequence
  Synthesized RNAi sequence
agguguuagcuaaaauguaauc

SEQ ID NO: 3381 - RNA, 22 nt, Artificial Sequence
  Synthesized RNAi sequence
agguuuaccaacuucccaugaa

SEQ ID NO: 3382 - RNA, 22 nt, Artificial Sequence
  Synthesized RNAi sequence
aguaaagacauaauuucgguua

SEQ ID NO: 3383 - RNA, 22 nt, Artificial Sequence
  Synthesized RNAi sequence
aguaaaguugagucacaucugu

SEQ ID NO: 3384 - RNA, 22 nt, Artificial Sequence
  Synthesized RNAi sequence
aguaauucuaacauagugcucu

SEQ ID NO: 3385 - RNA, 22 nt, Artificial Sequence
  Synthesized RNAi sequence
aguacagguguuagcuaaaaug

SEQ ID NO: 3386 - RNA, 22 nt, Artificial Sequence
  Synthesized RNAi sequence
aguagagagcuaggccaauagc

SEQ ID NO: 3387 - RNA, 22 nt, Artificial Sequence
  Synthesized RNAi sequence
aguagcaauaccauaagacagu

SEQ ID NO: 3388 - RNA, 22 nt, Artificial Sequence
  Synthesized RNAi sequence
aguaugccuacuuuugcucugg

SEQ ID NO: 3389 - RNA, 22 nt, Artificial Sequence
  Synthesized RNAi sequence
agucacaucugugacaucacaa

SEQ ID NO: 3390 - RNA, 22 nt, Artificial Sequence
  Synthesized RNAi sequence
agucccaaaaucuuugaggcua

SEQ ID NO: 3391 - RNA, 22 nt, Artificial Sequence
  Synthesized RNAi sequence
aguccuguuacauuuucagcuu

SEQ ID NO: 3392 - RNA, 22 nt, Artificial Sequence
  Synthesized RNAi sequence
agucuacacacugaauugaaau

SEQ ID NO: 3393 - RNA, 22 nt, Artificial Sequence
  Synthesized RNAi sequence
agucugugaauugcaaagaaca

SEQ ID NO: 3394 - RNA, 22 nt, Artificial Sequence
  Synthesized RNAi sequence
agugaauaugacauagucauau

SEQ ID NO: 3395 - RNA, 22 nt, Artificial Sequence
  Synthesized RNAi sequence
agugagcuguuucagugguuug

SEQ ID NO: 3396 - RNA, 22 nt, Artificial Sequence
  Synthesized RNAi sequence
agugcaucaacagcggcaugag

SEQ ID NO: 3397 - RNA, 22 nt, Artificial Sequence
  Synthesized RNAi sequence
agugcucuuguggcacuagugu

SEQ ID NO: 3398 - RNA, 22 nt, Artificial Sequence
  Synthesized RNAi sequence
agugcuuagcacguaaucuggc

SEQ ID NO: 3399 - RNA, 22 nt, Artificial Sequence
  Synthesized RNAi sequence
agugguggucuagguuuaccaa

SEQ ID NO: 3400 - RNA, 22 nt, Artificial Sequence
  Synthesized RNAi sequence
agugguuugagugaauaugaca

SEQ ID NO: 3401 - RNA, 22 nt, Artificial Sequence
  Synthesized RNAi sequence
aguguagaauacuuuugcauac

SEQ ID NO: 3402 - RNA, 22 nt, Artificial Sequence
  Synthesized RNAi sequence
aguguaggugcacuuaauggca

SEQ ID NO: 3403 - RNA, 22 nt, Artificial Sequence
  Synthesized RNAi sequence
agugucaacaauuucagcagga

SEQ ID NO: 3404 - RNA, 22 nt, Artificial Sequence
  Synthesized RNAi sequence
agugugcccuuaguuagcaaug

SEQ ID NO: 3405 - RNA, 22 nt, Artificial Sequence
  Synthesized RNAi sequence
aguguuggguauaagccaguaa

SEQ ID NO: 3406 - RNA, 22 nt, Artificial Sequence
  Synthesized RNAi sequence
aguuagcaaugugcguggugca

SEQ ID NO: 3407 - RNA, 22 nt, Artificial Sequence
  Synthesized RNAi sequence
aguuccgaggaacaugucugga

SEQ ID NO: 3408 - RNA, 22 nt, Artificial Sequence
  Synthesized RNAi sequence
aguugagucacaucugugacau

SEQ ID NO: 3409 - RNA, 22 nt, Artificial Sequence
  Synthesized RNAi sequence
aguugccacauuccuacgugga

SEQ ID NO: 3410 - RNA, 22 nt, Artificial Sequence
  Synthesized RNAi sequence
aguugguagucccaaaaucuuu

SEQ ID NO: 3411 - RNA, 22 nt, Artificial Sequence
  Synthesized RNAi sequence
aguuguuguaccucgguaaaca

SEQ ID NO: 3412 - RNA, 22 nt, Artificial Sequence
  Synthesized RNAi sequence
aguuuaaaugucuccucaguag

SEQ ID NO: 3413 - RNA, 22 nt, Artificial Sequence
  Synthesized RNAi sequence
aguuugaguugguagucccaaa

SEQ ID NO: 3414 - RNA, 22 nt, Artificial Sequence
  Synthesized RNAi sequence
aguuuucauaagucuacacacu

SEQ ID NO: 3415 - RNA, 22 nt, Artificial Sequence
  Synthesized RNAi sequence
auaaaacauuuuaaagcauuga

SEQ ID NO: 3416 - RNA, 22 nt, Artificial Sequence
  Synthesized RNAi sequence
auaaaccaaagcacucacagug

SEQ ID NO: 3417 - RNA, 22 nt, Artificial Sequence
  Synthesized RNAi sequence
auaaagacagcuuuucuccaag

SEQ ID NO: 3418 - RNA, 22 nt, Artificial Sequence
  Synthesized RNAi sequence
auaaaggucucuaucagacauu

SEQ ID NO: 3419 - RNA, 22 nt, Artificial Sequence
  Synthesized RNAi sequence
auaacacccuuauaaaacauuu

SEQ ID NO: 3420 - RNA, 22 nt, Artificial Sequence
  Synthesized RNAi sequence
auaagaauggucuacguaugca

SEQ ID NO: 3421 - RNA, 22 nt, Artificial Sequence
  Synthesized RNAi sequence
auaagccaguaauucuaacaua

SEQ ID NO: 3422 - RNA, 22 nt, Artificial Sequence
  Synthesized RNAi sequence
auaaggugaaauaaagacagcu

SEQ ID NO: 3423 - RNA, 22 nt, Artificial Sequence
  Synthesized RNAi sequence
auaagucuacacacugaauuga

SEQ ID NO: 3424 - RNA, 22 nt, Artificial Sequence
  Synthesized RNAi sequence
auaauagcucauaccuccuaag

SEQ ID NO: 3425 - RNA, 22 nt, Artificial Sequence
  Synthesized RNAi sequence
auaaucaccaacauuuaauuug

SEQ ID NO: 3426 - RNA, 22 nt, Artificial Sequence
  Synthesized RNAi sequence
auaauucuacuacauuuaucua

SEQ ID NO: 3427 - RNA, 22 nt, Artificial Sequence
  Synthesized RNAi sequence
auaauuucgguuaagugguggu

SEQ ID NO: 3428 - RNA, 22 nt, Artificial Sequence
  Synthesized RNAi sequence
auaauuugcaacauugcuagaa

SEQ ID NO: 3429 - RNA, 22 nt, Artificial Sequence
  Synthesized RNAi sequence
auaauuuguggccauugaaauu

SEQ ID NO: 3430 - RNA, 22 nt, Artificial Sequence
  Synthesized RNAi sequence
auacacuaugcgagcagaaggg

SEQ ID NO: 3431 - RNA, 22 nt, Artificial Sequence
  Synthesized RNAi sequence
auaccaaccuuuugauaauuug

SEQ ID NO: 3432 - RNA, 22 nt, Artificial Sequence
  Synthesized RNAi sequence
auaccauaagacaguuuaaaug

SEQ ID NO: 3433 - RNA, 22 nt, Artificial Sequence
  Synthesized RNAi sequence
auaccuccuaaguaaaguugag

SEQ ID NO: 3434 - RNA, 22 nt, Artificial Sequence
  Synthesized RNAi sequence
auacggauuaacagacaagacu

SEQ ID NO: 3435 - RNA, 22 nt, Artificial Sequence
  Synthesized RNAi sequence
auacuuuugcauaccaaccuuu

SEQ ID NO: 3436 - RNA, 22 nt, Artificial Sequence
  Synthesized RNAi sequence
auagcaaaaugacucuuaccag

SEQ ID NO: 3437 - RNA, 22 nt, Artificial Sequence
  Synthesized RNAi sequence
auagcucauaccuccuaaguaa

SEQ ID NO: 3438 - RNA, 22 nt, Artificial Sequence
  Synthesized RNAi sequence
auaggcaaauauuuuaaugccu

SEQ ID NO: 3439 - RNA, 22 nt, Artificial Sequence
  Synthesized RNAi sequence
auagucauauucugagcccugu

SEQ ID NO: 3440 - RNA, 22 nt, Artificial Sequence
  Synthesized RNAi sequence
auagugcaucaacagcggcaug

SEQ ID NO: 3441 - RNA, 22 nt, Artificial Sequence
  Synthesized RNAi sequence
auagugcucuuguggcacuagu

SEQ ID NO: 3442 - RNA, 22 nt, Artificial Sequence
  Synthesized RNAi sequence
auagugcuuagcacguaaucug

SEQ ID NO: 3443 - RNA, 22 nt, Artificial Sequence
  Synthesized RNAi sequence
auaguuuucauaagucuacaca

SEQ ID NO: 3444 - RNA, 22 nt, Artificial Sequence
  Synthesized RNAi sequence
auaucugcugucgucucaggca

SEQ ID NO: 3445 - RNA, 22 nt, Artificial Sequence
  Synthesized RNAi sequence
auaugacauagucauauucuga

SEQ ID NO: 3446 - RNA, 22 nt, Artificial Sequence
  Synthesized RNAi sequence
auaugacauggucguaacagca

SEQ ID NO: 3447 - RNA, 22 nt, Artificial Sequence
  Synthesized RNAi sequence
auauucugagcccugugaugaa

SEQ ID NO: 3448 - RNA, 22 nt, Artificial Sequence
  Synthesized RNAi sequence
auauucugguucuagugugccc

SEQ ID NO: 3449 - RNA, 22 nt, Artificial Sequence
  Synthesized RNAi sequence
auauugaguguuggguauaagc

SEQ ID NO: 3450 - RNA, 22 nt, Artificial Sequence
  Synthesized RNAi sequence
auauuuuaaugccuucucacau

SEQ ID NO: 3451 - RNA, 22 nt, Artificial Sequence
  Synthesized RNAi sequence
aucaaaacacucuacacgagca

SEQ ID NO: 3452 - RNA, 22 nt, Artificial Sequence
  Synthesized RNAi sequence
aucaaagacaacuauaucugcu

SEQ ID NO: 3453 - RNA, 22 nt, Artificial Sequence
  Synthesized RNAi sequence
aucaacagcggcaugagagcaa

SEQ ID NO: 3454 - RNA, 22 nt, Artificial Sequence
  Synthesized RNAi sequence
aucaacaguuugaguugguagu

SEQ ID NO: 3455 - RNA, 22 nt, Artificial Sequence
  Synthesized RNAi sequence
aucacaaccuggagcauugcaa

SEQ ID NO: 3456 - RNA, 22 nt, Artificial Sequence
  Synthesized RNAi sequence
aucaccaacauuuaauuuguaa

SEQ ID NO: 3457 - RNA, 22 nt, Artificial Sequence
  Synthesized RNAi sequence
aucauaaaccaaagcacucaca

SEQ ID NO: 3458 - RNA, 22 nt, Artificial Sequence
  Synthesized RNAi sequence
aucauaauuuguggccauugaa

SEQ ID NO: 3459 - RNA, 22 nt, Artificial Sequence
  Synthesized RNAi sequence
aucaugcgugauaacacccuua

SEQ ID NO: 3460 - RNA, 22 nt, Artificial Sequence
  Synthesized RNAi sequence
aucuauaggcaaauauuuuaau

SEQ ID NO: 3461 - RNA, 22 nt, Artificial Sequence
  Synthesized RNAi sequence
aucugagauauugaguguuggg

SEQ ID NO: 3462 - RNA, 22 nt, Artificial Sequence
  Synthesized RNAi sequence
aucuggcauugacaacacucaa

SEQ ID NO: 3463 - RNA, 22 nt, Artificial Sequence
  Synthesized RNAi sequence
aucugugacaucacaaccugga

SEQ ID NO: 3464 - RNA, 22 nt, Artificial Sequence
  Synthesized RNAi sequence
aucuguuuacauuacaagagug

SEQ ID NO: 3465 - RNA, 22 nt, Artificial Sequence
  Synthesized RNAi sequence
aucuuaaugaagucugugaauu

SEQ ID NO: 3466 - RNA, 22 nt, Artificial Sequence
  Synthesized RNAi sequence
aucuuuaaagaguccuguuaca

SEQ ID NO: 3467 - RNA, 22 nt, Artificial Sequence
  Synthesized RNAi sequence
aucuuugaggcuacagcauucu

SEQ ID NO: 3468 - RNA, 22 nt, Artificial Sequence
  Synthesized RNAi sequence
augaaacaucaugcgugauaac

SEQ ID NO: 3469 - RNA, 22 nt, Artificial Sequence
  Synthesized RNAi sequence
augaaagauguaauucucuguc

SEQ ID NO: 3470 - RNA, 22 nt, Artificial Sequence
  Synthesized RNAi sequence
augaagucugugaauugcaaag

SEQ ID NO: 3471 - RNA, 22 nt, Artificial Sequence
  Synthesized RNAi sequence
augaaucaacaguuugaguugg

SEQ ID NO: 3472 - RNA, 22 nt, Artificial Sequence
  Synthesized RNAi sequence
augacauagucauauucugagc

SEQ ID NO: 3473 - RNA, 22 nt, Artificial Sequence
  Synthesized RNAi sequence
augacauggucguaacagcauu

SEQ ID NO: 3474 - RNA, 22 nt, Artificial Sequence
  Synthesized RNAi sequence
augacucuuaccaguaccaggu

SEQ ID NO: 3475 - RNA, 22 nt, Artificial Sequence
  Synthesized RNAi sequence
augagagcaagcuguauacacu

SEQ ID NO: 3476 - RNA, 22 nt, Artificial Sequence
  Synthesized RNAi sequence
augcaagcaccacaucuuaaug

SEQ ID NO: 3477 - RNA, 22 nt, Artificial Sequence
  Synthesized RNAi sequence
augcauuuacaguacaaaagac

SEQ ID NO: 3478 - RNA, 22 nt, Artificial Sequence
  Synthesized RNAi sequence
augccuacuuuugcucugguaa

SEQ ID NO: 3479 - RNA, 22 nt, Artificial Sequence
  Synthesized RNAi sequence
augccuucucacauagugcauc

SEQ ID NO: 3480 - RNA, 22 nt, Artificial Sequence
  Synthesized RNAi sequence
augcgagcagaaggguaguaga

SEQ ID NO: 3481 - RNA, 22 nt, Artificial Sequence
  Synthesized RNAi sequence
augcgugauaacacccuuauaa

SEQ ID NO: 3482 - RNA, 22 nt, Artificial Sequence
  Synthesized RNAi sequence
auggaaaacuaaugggugguuu

SEQ ID NO: 3483 - RNA, 22 nt, Artificial Sequence
  Synthesized RNAi sequence
auggcauuacuguaugugaugu

SEQ ID NO: 3484 - RNA, 22 nt, Artificial Sequence
  Synthesized RNAi sequence
augggugguuuaugugauuuac

SEQ ID NO: 3485 - RNA, 22 nt, Artificial Sequence
  Synthesized RNAi sequence
auggucguaacagcauuuacaa

SEQ ID NO: 3486 - RNA, 22 nt, Artificial Sequence
  Synthesized RNAi sequence
auggucuacguaugcaagcacc

SEQ ID NO: 3487 - RNA, 22 nt, Artificial Sequence
  Synthesized RNAi sequence
auguaaucaccagcauuugucc

SEQ ID NO: 3488 - RNA, 22 nt, Artificial Sequence
  Synthesized RNAi sequence
auguaauucucugucagacagc

SEQ ID NO: 3489 - RNA, 22 nt, Artificial Sequence
  Synthesized RNAi sequence
augucagcacaaaauaaucacc

SEQ ID NO: 3490 - RNA, 22 nt, Artificial Sequence
  Synthesized RNAi sequence
augucuccucaguagcuuugag

SEQ ID NO: 3491 - RNA, 22 nt, Artificial Sequence
  Synthesized RNAi sequence
augucuggaccuauaguuuuca

SEQ ID NO: 3492 - RNA, 22 nt, Artificial Sequence
  Synthesized RNAi sequence
augugauguugauaugacaugg

SEQ ID NO: 3493 - RNA, 22 nt, Artificial Sequence
  Synthesized RNAi sequence
augugauuuacaauaauagcuc

SEQ ID NO: 3494 - RNA, 22 nt, Artificial Sequence
  Synthesized RNAi sequence
augugcguggugcagguaauug

SEQ ID NO: 3495 - RNA, 22 nt, Artificial Sequence
  Synthesized RNAi sequence
augugcuuuaagcuuauuauca

SEQ ID NO: 3496 - RNA, 22 nt, Artificial Sequence
  Synthesized RNAi sequence
auguugauaugacauggucgua

SEQ ID NO: 3497 - RNA, 22 nt, Artificial Sequence
  Synthesized RNAi sequence
auuaaaucuguuuacauuacaa

SEQ ID NO: 3498 - RNA, 22 nt, Artificial Sequence
  Synthesized RNAi sequence
auuaacagacaagacuaauuua

SEQ ID NO: 3499 - RNA, 22 nt, Artificial Sequence
  Synthesized RNAi sequence
auuacaagagugagcuguuuca

SEQ ID NO: 3500 - RNA, 22 nt, Artificial Sequence
  Synthesized RNAi sequence
auuacuguaugugaugucagca

SEQ ID NO: 3501 - RNA, 22 nt, Artificial Sequence
  Synthesized RNAi sequence
auuauaaggugaaauaaagaca

SEQ ID NO: 3502 - RNA, 22 nt, Artificial Sequence
  Synthesized RNAi sequence
auuaucauaaaccaaagcacuc

SEQ ID NO: 3503 - RNA, 22 nt, Artificial Sequence
  Synthesized RNAi sequence
auuaugcaaaguaugccuacuu

SEQ ID NO: 3504 - RNA, 22 nt, Artificial Sequence
  Synthesized RNAi sequence
auuccuacguggaauuucaaga

SEQ ID NO: 3505 - RNA, 22 nt, Artificial Sequence
  Synthesized RNAi sequence
auucuaacauagugcucuugug

SEQ ID NO: 3506 - RNA, 22 nt, Artificial Sequence
  Synthesized RNAi sequence
auucuacuacauuuaucuauag

SEQ ID NO: 3507 - RNA, 22 nt, Artificial Sequence
  Synthesized RNAi sequence
auucucugucagacagcacuuc

SEQ ID NO: 3508 - RNA, 22 nt, Artificial Sequence
  Synthesized RNAi sequence
auucugguucuagugugcccuu

SEQ ID NO: 3509 - RNA, 22 nt, Artificial Sequence
  Synthesized RNAi sequence
auucugugaauuauaaggugaa

SEQ ID NO: 3510 - RNA, 22 nt, Artificial Sequence
  Synthesized RNAi sequence
auugaaauauucugguucuagu

SEQ ID NO: 3511 - RNA, 22 nt, Artificial Sequence
  Synthesized RNAi sequence
auugacaacacucaaaucauaa

SEQ ID NO: 3512 - RNA, 22 nt, Artificial Sequence
  Synthesized RNAi sequence
auugagcagggucgccaaugua

SEQ ID NO: 3513 - RNA, 22 nt, Artificial Sequence
  Synthesized RNAi sequence
auugagcugauuugucuuuaug

SEQ ID NO: 3514 - RNA, 22 nt, Artificial Sequence
  Synthesized RNAi sequence
auugcaaacauacggauuaaca

SEQ ID NO: 3515 - RNA, 22 nt, Artificial Sequence
  Synthesized RNAi sequence
auugcaacuugucauaaagguc

SEQ ID NO: 3516 - RNA, 22 nt, Artificial Sequence
  Synthesized RNAi sequence
auugcagaugaaacaucaugcg

SEQ ID NO: 3517 - RNA, 22 nt, Artificial Sequence
  Synthesized RNAi sequence
auugcuagaaaacucaucugag

SEQ ID NO: 3518 - RNA, 22 nt, Artificial Sequence
  Synthesized RNAi sequence
auuuaauuuguaaguuguugua

SEQ ID NO: 3519 - RNA, 22 nt, Artificial Sequence
  Synthesized RNAi sequence
auuuacaacauaagaauggucu

SEQ ID NO: 3520 - RNA, 22 nt, Artificial Sequence
  Synthesized RNAi sequence
auuuacaguacaaaagacauac

SEQ ID NO: 3521 - RNA, 22 nt, Artificial Sequence
  Synthesized RNAi sequence
auuuaucuauaggcaaauauuu

SEQ ID NO: 3522 - RNA, 22 nt, Artificial Sequence
  Synthesized RNAi sequence
auuuaugugauguugauaugac

SEQ ID NO: 3523 - RNA, 22 nt, Artificial Sequence
  Synthesized RNAi sequence
auuucaagacuuguaaauugca

SEQ ID NO: 3524 - RNA, 22 nt, Artificial Sequence
  Synthesized RNAi sequence
auuucagcaggacaacgccgac

SEQ ID NO: 3525 - RNA, 22 nt, Artificial Sequence
  Synthesized RNAi sequence
auuucaucaaagacaacuauau

SEQ ID NO: 3526 - RNA, 22 nt, Artificial Sequence
  Synthesized RNAi sequence
auuucgguuaagugguggucua

SEQ ID NO: 3527 - RNA, 22 nt, Artificial Sequence
  Synthesized RNAi sequence
auuuguaaguuguuguaccucg

SEQ ID NO: 3528 - RNA, 22 nt, Artificial Sequence
  Synthesized RNAi sequence
auuugucuuuaugugcuuuaag

SEQ ID NO: 3529 - RNA, 22 nt, Artificial Sequence
  Synthesized RNAi sequence
auuuguggccauugaaauuuca

SEQ ID NO: 3530 - RNA, 22 nt, Artificial Sequence
  Synthesized RNAi sequence
auuuguggccuguuaauugcag

SEQ ID NO: 3531 - RNA, 22 nt, Artificial Sequence
  Synthesized RNAi sequence
auuuuaaagcauugagcugauu

SEQ ID NO: 3532 - RNA, 22 nt, Artificial Sequence
  Synthesized RNAi sequence
auuuuaaugccuucucacauag

SEQ ID NO: 3533 - RNA, 22 nt, Artificial Sequence
  Synthesized RNAi sequence
auuuucagcuuguaaaguugcc

SEQ ID NO: 3534 - RNA, 22 nt, Artificial Sequence
  Synthesized RNAi sequence
uaaaacauuuuaaagcauugag

SEQ ID NO: 3535 - RNA, 22 nt, Artificial Sequence
  Synthesized RNAi sequence
uaaaauguaaucaccagcauuu

SEQ ID NO: 3536 - RNA, 22 nt, Artificial Sequence
  Synthesized RNAi sequence
uaaaccaaagcacucacagugu

SEQ ID NO: 3537 - RNA, 22 nt, Artificial Sequence
  Synthesized RNAi sequence
uaaagacagcuuuucuccaagc

SEQ ID NO: 3538 - RNA, 22 nt, Artificial Sequence
  Synthesized RNAi sequence
uaaagacauaauuucgguuaag

SEQ ID NO: 3539 - RNA, 22 nt, Artificial Sequence
  Synthesized RNAi sequence
uaaagcauugagcugauuuguc

SEQ ID NO: 3540 - RNA, 22 nt, Artificial Sequence
  Synthesized RNAi sequence
uaaaggucucuaucagacauua

SEQ ID NO: 3541 - RNA, 22 nt, Artificial Sequence
  Synthesized RNAi sequence
uaaaguugagucacaucuguga

SEQ ID NO: 3542 - RNA, 22 nt, Artificial Sequence
  Synthesized RNAi sequence
uaaaguugccacauuccuacgu

SEQ ID NO: 3543 - RNA, 22 nt, Artificial Sequence
  Synthesized RNAi sequence
uaaaucuguuuacauuacaaga

SEQ ID NO: 3544 - RNA, 22 nt, Artificial Sequence
  Synthesized RNAi sequence
uaaaugucuccucaguagcuuu

SEQ ID NO: 3545 - RNA, 22 nt, Artificial Sequence
  Synthesized RNAi sequence
uaaauugcaacuugucauaaag

SEQ ID NO: 3546 - RNA, 22 nt, Artificial Sequence
  Synthesized RNAi sequence
uaacagacaagacuaauuuaug

SEQ ID NO: 3547 - RNA, 22 nt, Artificial Sequence
  Synthesized RNAi sequence
uaacagcauuuacaacauaaga

SEQ ID NO: 3548 - RNA, 22 nt, Artificial Sequence
  Synthesized RNAi sequence
uaacauagugcucuuguggcac

SEQ ID NO: 3549 - RNA, 22 nt, Artificial Sequence
  Synthesized RNAi sequence
uaaccaguaaagacauaauuuc

SEQ ID NO: 3550 - RNA, 22 nt, Artificial Sequence
  Synthesized RNAi sequence
uaagaauggucuacguaugcaa

SEQ ID NO: 3551 - RNA, 22 nt, Artificial Sequence
  Synthesized RNAi sequence
uaagccaguaauucuaacauag

SEQ ID NO: 3552 - RNA, 22 nt, Artificial Sequence
  Synthesized RNAi sequence
uaagcuuauuaucauaaaccaa

SEQ ID NO: 3553 - RNA, 22 nt, Artificial Sequence
  Synthesized RNAi sequence
uaaggugaaauaaagacagcuu

SEQ ID NO: 3554 - RNA, 22 nt, Artificial Sequence
  Synthesized RNAi sequence
uaaguaaaguugagucacaucu

SEQ ID NO: 3555 - RNA, 22 nt, Artificial Sequence
  Synthesized RNAi sequence
uaagucuacacacugaauugaa

SEQ ID NO: 3556 - RNA, 22 nt, Artificial Sequence
  Synthesized RNAi sequence
uaagugguggucuagguuuacc

SEQ ID NO: 3557 - RNA, 22 nt, Artificial Sequence
  Synthesized RNAi sequence
uaaguuguuguaccucgguaaa

SEQ ID NO: 3558 - RNA, 22 nt, Artificial Sequence
  Synthesized RNAi sequence
uaauagcaacauuaaaucuguu

SEQ ID NO: 3559 - RNA, 22 nt, Artificial Sequence
  Synthesized RNAi sequence
uaauagcucauaccuccuaagu

SEQ ID NO: 3560 - RNA, 22 nt, Artificial Sequence
  Synthesized RNAi sequence
uaaucaccaacauuuaauuugu

SEQ ID NO: 3561 - RNA, 22 nt, Artificial Sequence
  Synthesized RNAi sequence
uaaucaccagcauuuguccagu

SEQ ID NO: 3562 - RNA, 22 nt, Artificial Sequence
  Synthesized RNAi sequence
uaaucuggcauugacaacacuc

SEQ ID NO: 3563 - RNA, 22 nt, Artificial Sequence
  Synthesized RNAi sequence
uaaugaagucugugaauugcaa

SEQ ID NO: 3564 - RNA, 22 nt, Artificial Sequence
  Synthesized RNAi sequence
uaaugccuucucacauagugca

SEQ ID NO: 3565 - RNA, 22 nt, Artificial Sequence
  Synthesized RNAi sequence
uaauggcauuacuguaugugau

SEQ ID NO: 3566 - RNA, 22 nt, Artificial Sequence
  Synthesized RNAi sequence
uaaugggugguuuaugugauuu

SEQ ID NO: 3567 - RNA, 22 nt, Artificial Sequence
  Synthesized RNAi sequence
uaauucuaacauagugcucuug

SEQ ID NO: 3568 - RNA, 22 nt, Artificial Sequence
  Synthesized RNAi sequence
uaauucuacuacauuuaucuau

SEQ ID NO: 3569 - RNA, 22 nt, Artificial Sequence
  Synthesized RNAi sequence
uaauucucugucagacagcacu

SEQ ID NO: 3570 - RNA, 22 nt, Artificial Sequence
  Synthesized RNAi sequence
uaauugagcagggucgccaaug

SEQ ID NO: 3571 - RNA, 22 nt, Artificial Sequence
  Synthesized RNAi sequence
uaauugcagaugaaacaucaug

SEQ ID NO: 3572 - RNA, 22 nt, Artificial Sequence
  Synthesized RNAi sequence
uaauuuaugugauguugauaug

SEQ ID NO: 3573 - RNA, 22 nt, Artificial Sequence
  Synthesized RNAi sequence
uaauuucgguuaaguggugguc

SEQ ID NO: 3574 - RNA, 22 nt, Artificial Sequence
  Synthesized RNAi sequence
uaauuugcaacauugcuagaaa

SEQ ID NO: 3575 - RNA, 22 nt, Artificial Sequence
  Synthesized RNAi sequence
uaauuuguaaguuguuguaccu

SEQ ID NO: 3576 - RNA, 22 nt, Artificial Sequence
  Synthesized RNAi sequence
uaauuuguggccauugaaauuu

SEQ ID NO: 3577 - RNA, 22 nt, Artificial Sequence
  Synthesized RNAi sequence
uacaacauaagaauggucuacg

SEQ ID NO: 3578 - RNA, 22 nt, Artificial Sequence
  Synthesized RNAi sequence
uacaagagugagcuguuucagu

SEQ ID NO: 3579 - RNA, 22 nt, Artificial Sequence
  Synthesized RNAi sequence
uacaauaauagcucauaccucc

SEQ ID NO: 3580 - RNA, 22 nt, Artificial Sequence
  Synthesized RNAi sequence
uacaaucuuuaaagaguccugu

SEQ ID NO: 3581 - RNA, 22 nt, Artificial Sequence
  Synthesized RNAi sequence
uacacacugaauugaaauauuc

SEQ ID NO: 3582 - RNA, 22 nt, Artificial Sequence
  Synthesized RNAi sequence
uacacauagugcuuagcacgua

SEQ ID NO: 3583 - RNA, 22 nt, Artificial Sequence
  Synthesized RNAi sequence
uacacgagcacgugcagguaua

SEQ ID NO: 3584 - RNA, 22 nt, Artificial Sequence
  Synthesized RNAi sequence
uacacuaugcgagcagaagggu

SEQ ID NO: 3585 - RNA, 22 nt, Artificial Sequence
  Synthesized RNAi sequence
uacagcauucugugaauuauaa

SEQ ID NO: 3586 - RNA, 22 nt, Artificial Sequence
  Synthesized RNAi sequence
uacagguguuagcuaaaaugua

SEQ ID NO: 3587 - RNA, 22 nt, Artificial Sequence
  Synthesized RNAi sequence
uacaguacaaaagacauacugu

SEQ ID NO: 3588 - RNA, 22 nt, Artificial Sequence
  Synthesized RNAi sequence
uacaguagcaauaccauaagac

SEQ ID NO: 3589 - RNA, 22 nt, Artificial Sequence
  Synthesized RNAi sequence
uacauuacaagagugagcuguu

SEQ ID NO: 3590 - RNA, 22 nt, Artificial Sequence
  Synthesized RNAi sequence
uacauuuaucuauaggcaaaua

SEQ ID NO: 3591 - RNA, 22 nt, Artificial Sequence
  Synthesized RNAi sequence
uacauuuucagcuuguaaaguu

SEQ ID NO: 3592 - RNA, 22 nt, Artificial Sequence
  Synthesized RNAi sequence
uaccaaccuuuugauaauuugc

SEQ ID NO: 3593 - RNA, 22 nt, Artificial Sequence
  Synthesized RNAi sequence
uaccaacuucccaugaaagaug

SEQ ID NO: 3594 - RNA, 22 nt, Artificial Sequence
  Synthesized RNAi sequence
uaccagguggucccuggagugu

SEQ ID NO: 3595 - RNA, 22 nt, Artificial Sequence
  Synthesized RNAi sequence
uaccaguaccagguggucccug

SEQ ID NO: 3596 - RNA, 22 nt, Artificial Sequence
  Synthesized RNAi sequence
uaccauaagacaguuuaaaugu

SEQ ID NO: 3597 - RNA, 22 nt, Artificial Sequence
  Synthesized RNAi sequence
uaccuccuaaguaaaguugagu

SEQ ID NO: 3598 - RNA, 22 nt, Artificial Sequence
  Synthesized RNAi sequence
uaccucgguaaacaacagcauc

SEQ ID NO: 3599 - RNA, 22 nt, Artificial Sequence
  Synthesized RNAi sequence
uacggauuaacagacaagacua

SEQ ID NO: 3600 - RNA, 22 nt, Artificial Sequence
  Synthesized RNAi sequence
uacguaugcaagcaccacaucu

SEQ ID NO: 3601 - RNA, 22 nt, Artificial Sequence
  Synthesized RNAi sequence
uacguggaauuucaagacuugu

SEQ ID NO: 3602 - RNA, 22 nt, Artificial Sequence
  Synthesized RNAi sequence
uacuacauuuaucuauaggcaa

SEQ ID NO: 3603 - RNA, 22 nt, Artificial Sequence
  Synthesized RNAi sequence
uacuguaugugaugucagcaca

SEQ ID NO: 3604 - RNA, 22 nt, Artificial Sequence
  Synthesized RNAi sequence
uacuuuugcucugguaauagca

SEQ ID NO: 3605 - RNA, 22 nt, Artificial Sequence
  Synthesized RNAi sequence
uagaaaacucaucugagauauu

SEQ ID NO: 3606 - RNA, 22 nt, Artificial Sequence
  Synthesized RNAi sequence
uagaauacuuuugcauaccaac

SEQ ID NO: 3607 - RNA, 22 nt, Artificial Sequence
  Synthesized RNAi sequence
uagagagcuaggccaauagcaa

SEQ ID NO: 3608 - RNA, 22 nt, Artificial Sequence
  Synthesized RNAi sequence
uagcaaaaugacucuuaccagu

SEQ ID NO: 3609 - RNA, 22 nt, Artificial Sequence
  Synthesized RNAi sequence
uagcaacauuaaaucuguuuac

SEQ ID NO: 3610 - RNA, 22 nt, Artificial Sequence
  Synthesized RNAi sequence
uagcaauaccauaagacaguuu

SEQ ID NO: 3611 - RNA, 22 nt, Artificial Sequence
  Synthesized RNAi sequence
uagcaaugugcguggugcaggu

SEQ ID NO: 3612 - RNA, 22 nt, Artificial Sequence
  Synthesized RNAi sequence
uagcacguaaucuggcauugac

SEQ ID NO: 3613 - RNA, 22 nt, Artificial Sequence
  Synthesized RNAi sequence
uagcuaaaauguaaucaccagc

SEQ ID NO: 3614 - RNA, 22 nt, Artificial Sequence
  Synthesized RNAi sequence
uagcucauaccuccuaaguaaa

SEQ ID NO: 3615 - RNA, 22 nt, Artificial Sequence
  Synthesized RNAi sequence
uaggcaaauauuuuaaugccuu

SEQ ID NO: 3616 - RNA, 22 nt, Artificial Sequence
  Synthesized RNAi sequence
uaggugcacuuaauggcauuac

SEQ ID NO: 3617 - RNA, 22 nt, Artificial Sequence
  Synthesized RNAi sequence
uagguuuaccaacuucccauga

SEQ ID NO: 3618 - RNA, 22 nt, Artificial Sequence
  Synthesized RNAi sequence
uaguagagagcuaggccaauag

SEQ ID NO: 3619 - RNA, 22 nt, Artificial Sequence
  Synthesized RNAi sequence
uagucauauucugagcccugug

SEQ ID NO: 3620 - RNA, 22 nt, Artificial Sequence
  Synthesized RNAi sequence
uagucccaaaaucuuugaggcu

SEQ ID NO: 3621 - RNA, 22 nt, Artificial Sequence
  Synthesized RNAi sequence
uagugcaucaacagcggcauga

SEQ ID NO: 3622 - RNA, 22 nt, Artificial Sequence
  Synthesized RNAi sequence
uagugcucuuguggcacuagug

SEQ ID NO: 3623 - RNA, 22 nt, Artificial Sequence
  Synthesized RNAi sequence
uagugcuuagcacguaaucugg

SEQ ID NO: 3624 - RNA, 22 nt, Artificial Sequence
  Synthesized RNAi sequence
uaguguaggugcacuuaauggc

SEQ ID NO: 3625 - RNA, 22 nt, Artificial Sequence
  Synthesized RNAi sequence
uaguuagcaaugugcguggugc

SEQ ID NO: 3626 - RNA, 22 nt, Artificial Sequence
  Synthesized RNAi sequence
uaguuuucauaagucuacacac

SEQ ID NO: 3627 - RNA, 22 nt, Artificial Sequence
  Synthesized RNAi sequence
uauaagccaguaauucuaacau

SEQ ID NO: 3628 - RNA, 22 nt, Artificial Sequence
  Synthesized RNAi sequence
uauaaggugaaauaaagacagc

SEQ ID NO: 3629 - RNA, 22 nt, Artificial Sequence
  Synthesized RNAi sequence
uauaauucuacuacauuuaucu

SEQ ID NO: 3630 - RNA, 22 nt, Artificial Sequence
  Synthesized RNAi sequence
uauacacuaugcgagcagaagg

SEQ ID NO: 3631 - RNA, 22 nt, Artificial Sequence
  Synthesized RNAi sequence
uauaggcaaauauuuuaaugcc

SEQ ID NO: 3632 - RNA, 22 nt, Artificial Sequence
  Synthesized RNAi sequence
uauaguuuucauaagucuacac

SEQ ID NO: 3633 - RNA, 22 nt, Artificial Sequence
  Synthesized RNAi sequence
uauaucugcugucgucucaggc

SEQ ID NO: 3634 - RNA, 22 nt, Artificial Sequence
  Synthesized RNAi sequence
uaucaaaacacucuacacgagc

SEQ ID NO: 3635 - RNA, 22 nt, Artificial Sequence
  Synthesized RNAi sequence
uaucagacauuaugcaaaguau

SEQ ID NO: 3636 - RNA, 22 nt, Artificial Sequence
  Synthesized RNAi sequence
uaucauaaaccaaagcacucac

SEQ ID NO: 3637 - RNA, 22 nt, Artificial Sequence
  Synthesized RNAi sequence
uaucugcugucgucucaggcaa

SEQ ID NO: 3638 - RNA, 22 nt, Artificial Sequence
  Synthesized RNAi sequence
uaugacauagucauauucugag

SEQ ID NO: 3639 - RNA, 22 nt, Artificial Sequence
  Synthesized RNAi sequence
uaugacauggucguaacagcau

SEQ ID NO: 3640 - RNA, 22 nt, Artificial Sequence
  Synthesized RNAi sequence
uaugcaagcaccacaucuuaau

SEQ ID NO: 3641 - RNA, 22 nt, Artificial Sequence
  Synthesized RNAi sequence
uaugccuacuuuugcucuggua

SEQ ID NO: 3642 - RNA, 22 nt, Artificial Sequence
  Synthesized RNAi sequence
uaugcgagcagaaggguaguag

SEQ ID NO: 3643 - RNA, 22 nt, Artificial Sequence
  Synthesized RNAi sequence
uaugugauguugauaugacaug

SEQ ID NO: 3644 - RNA, 22 nt, Artificial Sequence
  Synthesized RNAi sequence
uaugugauuuacaauaauagcu

SEQ ID NO: 3645 - RNA, 22 nt, Artificial Sequence
  Synthesized RNAi sequence
uaugugcuuuaagcuuauuauc

SEQ ID NO: 3646 - RNA, 22 nt, Artificial Sequence
  Synthesized RNAi sequence
uauuaucauaaaccaaagcacu

SEQ ID NO: 3647 - RNA, 22 nt, Artificial Sequence
  Synthesized RNAi sequence
uauucugagcccugugaugaau

SEQ ID NO: 3648 - RNA, 22 nt, Artificial Sequence
  Synthesized RNAi sequence
uauucugguucuagugugcccu

SEQ ID NO: 3649 - RNA, 22 nt, Artificial Sequence
  Synthesized RNAi sequence
uauugaguguuggguauaagcc

SEQ ID NO: 3650 - RNA, 22 nt, Artificial Sequence
  Synthesized RNAi sequence
uauuuguggccuguuaauugca

SEQ ID NO: 3651 - RNA, 22 nt, Artificial Sequence
  Synthesized RNAi sequence
uauuuuaaugccuucucacaua

SEQ ID NO: 3652 - RNA, 22 nt, Artificial Sequence
  Synthesized RNAi sequence
ucaaaacacucuacacgagcac

SEQ ID NO: 3653 - RNA, 22 nt, Artificial Sequence
  Synthesized RNAi sequence
ucaaagacaacuauaucugcug

SEQ ID NO: 3654 - RNA, 22 nt, Artificial Sequence
  Synthesized RNAi sequence
ucaaaucauaauuuguggccau

SEQ ID NO: 3655 - RNA, 22 nt, Artificial Sequence
  Synthesized RNAi sequence
ucaacaauuucagcaggacaac

SEQ ID NO: 3656 - RNA, 22 nt, Artificial Sequence
  Synthesized RNAi sequence
ucaacagcggcaugagagcaag

SEQ ID NO: 3657 - RNA, 22 nt, Artificial Sequence
  Synthesized RNAi sequence
ucaacaguuugaguugguaguc

SEQ ID NO: 3658 - RNA, 22 nt, Artificial Sequence
  Synthesized RNAi sequence
ucaagacuuguaaauugcaacu

SEQ ID NO: 3659 - RNA, 22 nt, Artificial Sequence
  Synthesized RNAi sequence
ucacaaccuggagcauugcaaa

SEQ ID NO: 3660 - RNA, 22 nt, Artificial Sequence
  Synthesized RNAi sequence
ucacauagugcaucaacagcgg

SEQ ID NO: 3661 - RNA, 22 nt, Artificial Sequence
  Synthesized RNAi sequence
ucacaucugugacaucacaacc

SEQ ID NO: 3662 - RNA, 22 nt, Artificial Sequence
  Synthesized RNAi sequence
ucaccaacauuuaauuuguaag

SEQ ID NO: 3663 - RNA, 22 nt, Artificial Sequence
  Synthesized RNAi sequence
ucacguacaguagcaauaccau

SEQ ID NO: 3664 - RNA, 22 nt, Artificial Sequence
  Synthesized RNAi sequence
ucagacagcacuucacguacag

SEQ ID NO: 3665 - RNA, 22 nt, Artificial Sequence
  Synthesized RNAi sequence
ucagcaggacaacgccgacaag

SEQ ID NO: 3666 - RNA, 22 nt, Artificial Sequence
  Synthesized RNAi sequence
ucagcuuguaaaguugccacau

SEQ ID NO: 3667 - RNA, 22 nt, Artificial Sequence
  Synthesized RNAi sequence
ucaggcaaugcauuuacaguac

SEQ ID NO: 3668 - RNA, 22 nt, Artificial Sequence
  Synthesized RNAi sequence
ucaguacagguguuagcuaaaa

SEQ ID NO: 3669 - RNA, 22 nt, Artificial Sequence
  Synthesized RNAi sequence
ucagugguuugagugaauauga

SEQ ID NO: 3670 - RNA, 22 nt, Artificial Sequence
  Synthesized RNAi sequence
ucauaaaccaaagcacucacag

SEQ ID NO: 3671 - RNA, 22 nt, Artificial Sequence
  Synthesized RNAi sequence
ucauaaaggucucuaucagaca

SEQ ID NO: 3672 - RNA, 22 nt, Artificial Sequence
  Synthesized RNAi sequence
ucauaagucuacacacugaauu

SEQ ID NO: 3673 - RNA, 22 nt, Artificial Sequence
  Synthesized RNAi sequence
ucauaauuuguggccauugaaa

SEQ ID NO: 3674 - RNA, 22 nt, Artificial Sequence
  Synthesized RNAi sequence
ucauaccuccuaaguaaaguug

SEQ ID NO: 3675 - RNA, 22 nt, Artificial Sequence
  Synthesized RNAi sequence
ucauauucugagcccugugaug

SEQ ID NO: 3676 - RNA, 22 nt, Artificial Sequence
  Synthesized RNAi sequence
ucaucaaagacaacuauaucug

SEQ ID NO: 3677 - RNA, 22 nt, Artificial Sequence
  Synthesized RNAi sequence
ucaucugagauauugaguguug

SEQ ID NO: 3678 - RNA, 22 nt, Artificial Sequence
  Synthesized RNAi sequence
ucaugcgugauaacacccuuau

SEQ ID NO: 3679 - RNA, 22 nt, Artificial Sequence
  Synthesized RNAi sequence
ucccaaaaucuuugaggcuaca

SEQ ID NO: 3680 - RNA, 22 nt, Artificial Sequence
  Synthesized RNAi sequence
ucccaugaaagauguaauucuc

SEQ ID NO: 3681 - RNA, 22 nt, Artificial Sequence
  Synthesized RNAi sequence
ucccuggaguguagaauacuuu

SEQ ID NO: 3682 - RNA, 22 nt, Artificial Sequence
  Synthesized RNAi sequence
uccgaggaacaugucuggaccu

SEQ ID NO: 3683 - RNA, 22 nt, Artificial Sequence
  Synthesized RNAi sequence
uccuaaguaaaguugagucaca

SEQ ID NO: 3684 - RNA, 22 nt, Artificial Sequence
  Synthesized RNAi sequence
uccuacguggaauuucaagacu

SEQ ID NO: 3685 - RNA, 22 nt, Artificial Sequence
  Synthesized RNAi sequence
uccuguuacauuuucagcuugu

SEQ ID NO: 3686 - RNA, 22 nt, Artificial Sequence
  Synthesized RNAi sequence
ucgccaauguacacauagugcu

SEQ ID NO: 3687 - RNA, 22 nt, Artificial Sequence
  Synthesized RNAi sequence
ucgguuaagugguggucuaggu

SEQ ID NO: 3688 - RNA, 22 nt, Artificial Sequence
  Synthesized RNAi sequence
ucguaacagcauuuacaacaua

SEQ ID NO: 3689 - RNA, 22 nt, Artificial Sequence
  Synthesized RNAi sequence
ucgucucaggcaaugcauuuac

SEQ ID NO: 3690 - RNA, 22 nt, Artificial Sequence
  Synthesized RNAi sequence
ucuaacauagugcucuuguggc

SEQ ID NO: 3691 - RNA, 22 nt, Artificial Sequence
  Synthesized RNAi sequence
ucuacacacugaauugaaauau

SEQ ID NO: 3692 - RNA, 22 nt, Artificial Sequence
  Synthesized RNAi sequence
ucuacacgagcacgugcaggua

SEQ ID NO: 3693 - RNA, 22 nt, Artificial Sequence
  Synthesized RNAi sequence
ucuacguaugcaagcaccacau

SEQ ID NO: 3694 - RNA, 22 nt, Artificial Sequence
  Synthesized RNAi sequence
ucuacuacauuuaucuauaggc

SEQ ID NO: 3695 - RNA, 22 nt, Artificial Sequence
  Synthesized RNAi sequence
ucuagguuuaccaacuucccau

SEQ ID NO: 3696 - RNA, 22 nt, Artificial Sequence
  Synthesized RNAi sequence
ucuagugugcccuuaguuagca

SEQ ID NO: 3697 - RNA, 22 nt, Artificial Sequence
  Synthesized RNAi sequence
ucuauaggcaaauauuuuaaug

SEQ ID NO: 3698 - RNA, 22 nt, Artificial Sequence
  Synthesized RNAi sequence
ucuaucagacauuaugcaaagu

SEQ ID NO: 3699 - RNA, 22 nt, Artificial Sequence
  Synthesized RNAi sequence
ucucacauagugcaucaacagc

SEQ ID NO: 3700 - RNA, 22 nt, Artificial Sequence
  Synthesized RNAi sequence
ucucaggcaaugcauuuacagu

SEQ ID NO: 3701 - RNA, 22 nt, Artificial Sequence
  Synthesized RNAi sequence
ucucuaucagacauuaugcaaa

SEQ ID NO: 3702 - RNA, 22 nt, Artificial Sequence
  Synthesized RNAi sequence
ucugagauauugaguguugggu

SEQ ID NO: 3703 - RNA, 22 nt, Artificial Sequence
  Synthesized RNAi sequence
ucugagcccugugaugaaucaa

SEQ ID NO: 3704 - RNA, 22 nt, Artificial Sequence
  Synthesized RNAi sequence
ucugcugucgucucaggcaaug

SEQ ID NO: 3705 - RNA, 22 nt, Artificial Sequence
  Synthesized RNAi sequence
ucuggaccuauaguuuucauaa

SEQ ID NO: 3706 - RNA, 22 nt, Artificial Sequence
  Synthesized RNAi sequence
ucuggcauugacaacacucaaa

SEQ ID NO: 3707 - RNA, 22 nt, Artificial Sequence
  Synthesized RNAi sequence
ucugguaauagcaacauuaaau

SEQ ID NO: 3708 - RNA, 22 nt, Artificial Sequence
  Synthesized RNAi sequence
ucugguucuagugugcccuuag

SEQ ID NO: 3709 - RNA, 22 nt, Artificial Sequence
  Synthesized RNAi sequence
ucugucagacagcacuucacgu

SEQ ID NO: 3710 - RNA, 22 nt, Artificial Sequence
  Synthesized RNAi sequence
ucugugaauuauaaggugaaau

SEQ ID NO: 3711 - RNA, 22 nt, Artificial Sequence
  Synthesized RNAi sequence
ucugugacaucacaaccuggag

SEQ ID NO: 3712 - RNA, 22 nt, Artificial Sequence
  Synthesized RNAi sequence
ucuguuuacauuacaagaguga

SEQ ID NO: 3713 - RNA, 22 nt, Artificial Sequence
  Synthesized RNAi sequence
ucuuaaugaagucugugaauug

SEQ ID NO: 3714 - RNA, 22 nt, Artificial Sequence
  Synthesized RNAi sequence
ucuuaccaguaccagguggucc

SEQ ID NO: 3715 - RNA, 22 nt, Artificial Sequence
  Synthesized RNAi sequence
ucuuguggcacuaguguaggug

SEQ ID NO: 3716 - RNA, 22 nt, Artificial Sequence
  Synthesized RNAi sequence
ucuuuaaagaguccuguuacau

SEQ ID NO: 3717 - RNA, 22 nt, Artificial Sequence
  Synthesized RNAi sequence
ucuuuaugugcuuuaagcuuau

SEQ ID NO: 3718 - RNA, 22 nt, Artificial Sequence
  Synthesized RNAi sequence
ucuuugaggcuacagcauucug

SEQ ID NO: 3719 - RNA, 22 nt, Artificial Sequence
  Synthesized RNAi sequence
ugaaacaucaugcgugauaaca

SEQ ID NO: 3720 - RNA, 22 nt, Artificial Sequence
  Synthesized RNAi sequence
ugaaagauguaauucucuguca

SEQ ID NO: 3721 - RNA, 22 nt, Artificial Sequence
  Synthesized RNAi sequence
ugaaauaaagacagcuuuucuc

SEQ ID NO: 3722 - RNA, 22 nt, Artificial Sequence
  Synthesized RNAi sequence
ugaaauauucugguucuagugu

SEQ ID NO: 3723 - RNA, 22 nt, Artificial Sequence
  Synthesized RNAi sequence
ugaagucugugaauugcaaaga

SEQ ID NO: 3724 - RNA, 22 nt, Artificial Sequence
  Synthesized RNAi sequence
ugaauaugacauagucauauuc

SEQ ID NO: 3725 - RNA, 22 nt, Artificial Sequence
  Synthesized RNAi sequence
ugaaucaacaguuugaguuggu

SEQ ID NO: 3726 - RNA, 22 nt, Artificial Sequence
  Synthesized RNAi sequence
ugaauuauaaggugaaauaaag

SEQ ID NO: 3727 - RNA, 22 nt, Artificial Sequence
  Synthesized RNAi sequence
ugaauugaaauauucugguucu

SEQ ID NO: 3728 - RNA, 22 nt, Artificial Sequence
  Synthesized RNAi sequence
ugacaacacucaaaucauaauu

SEQ ID NO: 3729 - RNA, 22 nt, Artificial Sequence
  Synthesized RNAi sequence
ugacauagucauauucugagcc

SEQ ID NO: 3730 - RNA, 22 nt, Artificial Sequence
  Synthesized RNAi sequence
ugacaucacaaccuggagcauu

SEQ ID NO: 3731 - RNA, 22 nt, Artificial Sequence
  Synthesized RNAi sequence
ugacauggucguaacagcauuu

SEQ ID NO: 3732 - RNA, 22 nt, Artificial Sequence
  Synthesized RNAi sequence
ugacucuuaccaguaccaggug

SEQ ID NO: 3733 - RNA, 22 nt, Artificial Sequence
  Synthesized RNAi sequence
ugagagcaagcuguauacacua

SEQ ID NO: 3734 - RNA, 22 nt, Artificial Sequence
  Synthesized RNAi sequence
ugagauauugaguguuggguau

SEQ ID NO: 3735 - RNA, 22 nt, Artificial Sequence
  Synthesized RNAi sequence
ugagcagggucgccaauguaca

SEQ ID NO: 3736 - RNA, 22 nt, Artificial Sequence
  Synthesized RNAi sequence
ugagcccugugaugaaucaaca

SEQ ID NO: 3737 - RNA, 22 nt, Artificial Sequence
  Synthesized RNAi sequence
ugagcugauuugucuuuaugug

SEQ ID NO: 3738 - RNA, 22 nt, Artificial Sequence
  Synthesized RNAi sequence
ugagcuguuucagugguuugag

SEQ ID NO: 3739 - RNA, 22 nt, Artificial Sequence
  Synthesized RNAi sequence
ugaggcuacagcauucugugaa

SEQ ID NO: 3740 - RNA, 22 nt, Artificial Sequence
  Synthesized RNAi sequence
ugagucacaucugugacaucac

SEQ ID NO: 3741 - RNA, 22 nt, Artificial Sequence
  Synthesized RNAi sequence
ugagugaauaugacauagucau

SEQ ID NO: 3742 - RNA, 22 nt, Artificial Sequence
  Synthesized RNAi sequence
ugaguguuggguauaagccagu

SEQ ID NO: 3743 - RNA, 22 nt, Artificial Sequence
  Synthesized RNAi sequence
ugaguugguagucccaaaaucu

SEQ ID NO: 3744 - RNA, 22 nt, Artificial Sequence
  Synthesized RNAi sequence
ugauaacacccuuauaaaacau

SEQ ID NO: 3745 - RNA, 22 nt, Artificial Sequence
  Synthesized RNAi sequence
ugauaauuugcaacauugcuag

SEQ ID NO: 3746 - RNA, 22 nt, Artificial Sequence
  Synthesized RNAi sequence
ugauaugacauggucguaacag

SEQ ID NO: 3747 - RNA, 22 nt, Artificial Sequence
  Synthesized RNAi sequence
ugaugaaucaacaguuugaguu

SEQ ID NO: 3748 - RNA, 22 nt, Artificial Sequence
  Synthesized RNAi sequence
ugaugucagcacaaaauaauca

SEQ ID NO: 3749 - RNA, 22 nt, Artificial Sequence
  Synthesized RNAi sequence
ugauguugauaugacauggucg

SEQ ID NO: 3750 - RNA, 22 nt, Artificial Sequence
  Synthesized RNAi sequence
ugauuuacaauaauagcucaua

SEQ ID NO: 3751 - RNA, 22 nt, Artificial Sequence
  Synthesized RNAi sequence
ugauuugucuuuaugugcuuua

SEQ ID NO: 3752 - RNA, 22 nt, Artificial Sequence
  Synthesized RNAi sequence
ugcaaacauacggauuaacaga

SEQ ID NO: 3753 - RNA, 22 nt, Artificial Sequence
  Synthesized RNAi sequence
ugcaaaguaugccuacuuuugc

SEQ ID NO: 3754 - RNA, 22 nt, Artificial Sequence
  Synthesized RNAi sequence
ugcaacuugucauaaaggucuc

SEQ ID NO: 3755 - RNA, 22 nt, Artificial Sequence
  Synthesized RNAi sequence
ugcaagcaccacaucuuaauga

SEQ ID NO: 3756 - RNA, 22 nt, Artificial Sequence
  Synthesized RNAi sequence
ugcacuuaauggcauuacugua

SEQ ID NO: 3757 - RNA, 22 nt, Artificial Sequence
  Synthesized RNAi sequence
ugcagaugaaacaucaugcgug

SEQ ID NO: 3758 - RNA, 22 nt, Artificial Sequence
  Synthesized RNAi sequence
ugcagguaauugagcagggucg

SEQ ID NO: 3759 - RNA, 22 nt, Artificial Sequence
  Synthesized RNAi sequence
ugcagguauaauucuacuacau

SEQ ID NO: 3760 - RNA, 22 nt, Artificial Sequence
  Synthesized RNAi sequence
ugcauaccaaccuuuugauaau

SEQ ID NO: 3761 - RNA, 22 nt, Artificial Sequence
  Synthesized RNAi sequence
ugcaucaacagcggcaugagag

SEQ ID NO: 3762 - RNA, 22 nt, Artificial Sequence
  Synthesized RNAi sequence
ugcauuuacaguacaaaagaca

SEQ ID NO: 3763 - RNA, 22 nt, Artificial Sequence
  Synthesized RNAi sequence
ugccacauuccuacguggaauu

SEQ ID NO: 3764 - RNA, 22 nt, Artificial Sequence
  Synthesized RNAi sequence
ugcccuuaguuagcaaugugcg

SEQ ID NO: 3765 - RNA, 22 nt, Artificial Sequence
  Synthesized RNAi sequence
ugccuacuuuugcucugguaau

SEQ ID NO: 3766 - RNA, 22 nt, Artificial Sequence
  Synthesized RNAi sequence
ugccuucucacauagugcauca

SEQ ID NO: 3767 - RNA, 22 nt, Artificial Sequence
  Synthesized RNAi sequence
ugcgagcagaaggguaguagag

SEQ ID NO: 3768 - RNA, 22 nt, Artificial Sequence
  Synthesized RNAi sequence
ugcgugauaacacccuuauaaa

SEQ ID NO: 3769 - RNA, 22 nt, Artificial Sequence
  Synthesized RNAi sequence
ugcguggugcagguaauugagc

SEQ ID NO: 3770 - RNA, 22 nt, Artificial Sequence
  Synthesized RNAi sequence
ugcuagaaaacucaucugagau

SEQ ID NO: 3771 - RNA, 22 nt, Artificial Sequence
  Synthesized RNAi sequence
ugcucugguaauagcaacauua

SEQ ID NO: 3772 - RNA, 22 nt, Artificial Sequence
  Synthesized RNAi sequence
ugcucuuguggcacuaguguag

SEQ ID NO: 3773 - RNA, 22 nt, Artificial Sequence
  Synthesized RNAi sequence
ugcuuagcacguaaucuggcau

SEQ ID NO: 3774 - RNA, 22 nt, Artificial Sequence
  Synthesized RNAi sequence
ugcuuuaagcuuauuaucauaa

SEQ ID NO: 3775 - RNA, 22 nt, Artificial Sequence
  Synthesized RNAi sequence
uggaaaacuaaugggugguuua

SEQ ID NO: 3776 - RNA, 22 nt, Artificial Sequence
  Synthesized RNAi sequence
uggaauuucaagacuuguaaau

SEQ ID NO: 3777 - RNA, 22 nt, Artificial Sequence
  Synthesized RNAi sequence
uggaccuauaguuuucauaagu

SEQ ID NO: 3778 - RNA, 22 nt, Artificial Sequence
  Synthesized RNAi sequence
uggagcauugcaaacauacgga

SEQ ID NO: 3779 - RNA, 22 nt, Artificial Sequence
  Synthesized RNAi sequence
uggaguguagaauacuuuugca

SEQ ID NO: 3780 - RNA, 22 nt, Artificial Sequence
  Synthesized RNAi sequence
uggcacuaguguaggugcacuu

SEQ ID NO: 3781 - RNA, 22 nt, Artificial Sequence
  Synthesized RNAi sequence
uggcauuacuguaugugauguc

SEQ ID NO: 3782 - RNA, 22 nt, Artificial Sequence
  Synthesized RNAi sequence
uggcauugacaacacucaaauc

SEQ ID NO: 3783 - RNA, 22 nt, Artificial Sequence
  Synthesized RNAi sequence
uggccauugaaauuucaucaaa

SEQ ID NO: 3784 - RNA, 22 nt, Artificial Sequence
  Synthesized RNAi sequence
uggccuguuaauugcagaugaa

SEQ ID NO: 3785 - RNA, 22 nt, Artificial Sequence
  Synthesized RNAi sequence
ugggugguuuaugugauuuaca

SEQ ID NO: 3786 - RNA, 22 nt, Artificial Sequence
  Synthesized RNAi sequence
ugguaauagcaacauuaaaucu

SEQ ID NO: 3787 - RNA, 22 nt, Artificial Sequence
  Synthesized RNAi sequence
ugguagucccaaaaucuuugag

SEQ ID NO: 3788 - RNA, 22 nt, Artificial Sequence
  Synthesized RNAi sequence
uggucccuggaguguagaauac

SEQ ID NO: 3789 - RNA, 22 nt, Artificial Sequence
  Synthesized RNAi sequence
uggucguaacagcauuuacaac

SEQ ID NO: 3790 - RNA, 22 nt, Artificial Sequence
  Synthesized RNAi sequence
uggucuacguaugcaagcacca

SEQ ID NO: 3791 - RNA, 22 nt, Artificial Sequence
  Synthesized RNAi sequence
uggucuagguuuaccaacuucc

SEQ ID NO: 3792 - RNA, 22 nt, Artificial Sequence
  Synthesized RNAi sequence
uggugcagguaauugagcaggg

SEQ ID NO: 3793 - RNA, 22 nt, Artificial Sequence
  Synthesized RNAi sequence
ugguggucuagguuuaccaacu

SEQ ID NO: 3794 - RNA, 22 nt, Artificial Sequence
  Synthesized RNAi sequence
ugguucuagugugcccuuaguu

SEQ ID NO: 3795 - RNA, 22 nt, Artificial Sequence
  Synthesized RNAi sequence
ugguuuaugugauuuacaauaa

SEQ ID NO: 3796 - RNA, 22 nt, Artificial Sequence
  Synthesized RNAi sequence
ugguuugagugaauaugacaua

SEQ ID NO: 3797 - RNA, 22 nt, Artificial Sequence
  Synthesized RNAi sequence
uguaaauugcaacuugucauaa

SEQ ID NO: 3798 - RNA, 22 nt, Artificial Sequence
  Synthesized RNAi sequence
uguaaguuguuguaccucggua

SEQ ID NO: 3799 - RNA, 22 nt, Artificial Sequence
  Synthesized RNAi sequence
uguaaucaccagcauuugucca

SEQ ID NO: 3800 - RNA, 22 nt, Artificial Sequence
  Synthesized RNAi sequence
uguaauucucugucagacagca

SEQ ID NO: 3801 - RNA, 22 nt, Artificial Sequence
  Synthesized RNAi sequence
uguacacauagugcuuagcacg

SEQ ID NO: 3802 - RNA, 22 nt, Artificial Sequence
  Synthesized RNAi sequence
uguaccucgguaaacaacagca

SEQ ID NO: 3803 - RNA, 22 nt, Artificial Sequence
  Synthesized RNAi sequence
uguagaauacuuuugcauacca

SEQ ID NO: 3804 - RNA, 22 nt, Artificial Sequence
  Synthesized RNAi sequence
uguaggugcacuuaauggcauu

SEQ ID NO: 3805 - RNA, 22 nt, Artificial Sequence
  Synthesized RNAi sequence
uguauacacuaugcgagcagaa

SEQ ID NO: 3806 - RNA, 22 nt, Artificial Sequence
  Synthesized RNAi sequence
uguaugugaugucagcacaaaa

SEQ ID NO: 3807 - RNA, 22 nt, Artificial Sequence
  Synthesized RNAi sequence
ugucaacaauuucagcaggaca

SEQ ID NO: 3808 - RNA, 22 nt, Artificial Sequence
  Synthesized RNAi sequence
ugucagacagcacuucacguac

SEQ ID NO: 3809 - RNA, 22 nt, Artificial Sequence
  Synthesized RNAi sequence
ugucagcacaaaauaaucacca

SEQ ID NO: 3810 - RNA, 22 nt, Artificial Sequence
  Synthesized RNAi sequence
ugucauaaaggucucuaucaga

SEQ ID NO: 3811 - RNA, 22 nt, Artificial Sequence
  Synthesized RNAi sequence
ugucgucucaggcaaugcauuu

SEQ ID NO: 3812 - RNA, 22 nt, Artificial Sequence
  Synthesized RNAi sequence
ugucuccucaguagcuuugagc

SEQ ID NO: 3813 - RNA, 22 nt, Artificial Sequence
  Synthesized RNAi sequence
ugucuggaccuauaguuuucau

SEQ ID NO: 3814 - RNA, 22 nt, Artificial Sequence
  Synthesized RNAi sequence
ugugaauuauaaggugaaauaa

SEQ ID NO: 3815 - RNA, 22 nt, Artificial Sequence
  Synthesized RNAi sequence
ugugacaucacaaccuggagca

SEQ ID NO: 3816 - RNA, 22 nt, Artificial Sequence
  Synthesized RNAi sequence
ugugaugaaucaacaguuugag

SEQ ID NO: 3817 - RNA, 22 nt, Artificial Sequence
  Synthesized RNAi sequence
ugugaugucagcacaaaauaau

SEQ ID NO: 3818 - RNA, 22 nt, Artificial Sequence
  Synthesized RNAi sequence
ugugauguugauaugacauggu

SEQ ID NO: 3819 - RNA, 22 nt, Artificial Sequence
  Synthesized RNAi sequence
ugugauuuacaauaauagcuca

SEQ ID NO: 3820 - RNA, 22 nt, Artificial Sequence
  Synthesized RNAi sequence
ugugcccuuaguuagcaaugug

SEQ ID NO: 3821 - RNA, 22 nt, Artificial Sequence
  Synthesized RNAi sequence
ugugcguggugcagguaauuga

SEQ ID NO: 3822 - RNA, 22 nt, Artificial Sequence
  Synthesized RNAi sequence
ugugcuuuaagcuuauuaucau

SEQ ID NO: 3823 - RNA, 22 nt, Artificial Sequence
  Synthesized RNAi sequence
uguggcacuaguguaggugcac

SEQ ID NO: 3824 - RNA, 22 nt, Artificial Sequence
  Synthesized RNAi sequence
uguggccauugaaauuucauca

SEQ ID NO: 3825 - RNA, 22 nt, Artificial Sequence
  Synthesized RNAi sequence
uguggccuguuaauugcagaug

SEQ ID NO: 3826 - RNA, 22 nt, Artificial Sequence
  Synthesized RNAi sequence
uguuaauugcagaugaaacauc

SEQ ID NO: 3827 - RNA, 22 nt, Artificial Sequence
  Synthesized RNAi sequence
uguuagcuaaaauguaaucacc

SEQ ID NO: 3828 - RNA, 22 nt, Artificial Sequence
  Synthesized RNAi sequence
uguugauaugacauggucguaa

SEQ ID NO: 3829 - RNA, 22 nt, Artificial Sequence
  Synthesized RNAi sequence
uguuggguauaagccaguaauu

SEQ ID NO: 3830 - RNA, 22 nt, Artificial Sequence
  Synthesized RNAi sequence
uguuguaccucgguaaacaaca

SEQ ID NO: 3831 - RNA, 22 nt, Artificial Sequence
  Synthesized RNAi sequence
uguuuacauuacaagagugagc

SEQ ID NO: 3832 - RNA, 22 nt, Artificial Sequence
  Synthesized RNAi sequence
uguuucagugguuugagugaau

SEQ ID NO: 3833 - RNA, 22 nt, Artificial Sequence
  Synthesized RNAi sequence
uuaaagcauugagcugauuugu

SEQ ID NO: 3834 - RNA, 22 nt, Artificial Sequence
  Synthesized RNAi sequence
uuaaaucuguuuacauuacaag

SEQ ID NO: 3835 - RNA, 22 nt, Artificial Sequence
  Synthesized RNAi sequence
uuaaaugucuccucaguagcuu

SEQ ID NO: 3836 - RNA, 22 nt, Artificial Sequence
  Synthesized RNAi sequence
uuaacagacaagacuaauuuau

SEQ ID NO: 3837 - RNA, 22 nt, Artificial Sequence
  Synthesized RNAi sequence
uuaagugguggucuagguuuac

SEQ ID NO: 3838 - RNA, 22 nt, Artificial Sequence
  Synthesized RNAi sequence
uuaaugaagucugugaauugca

SEQ ID NO: 3839 - RNA, 22 nt, Artificial Sequence
  Synthesized RNAi sequence
uuaaugccuucucacauagugc

SEQ ID NO: 3840 - RNA, 22 nt, Artificial Sequence
  Synthesized RNAi sequence
uuaauggcauuacuguauguga

SEQ ID NO: 3841 - RNA, 22 nt, Artificial Sequence
  Synthesized RNAi sequence
uuaauugcagaugaaacaucau

SEQ ID NO: 3842 - RNA, 22 nt, Artificial Sequence
  Synthesized RNAi sequence
uuaauuuguaaguuguuguacc

SEQ ID NO: 3843 - RNA, 22 nt, Artificial Sequence
  Synthesized RNAi sequence
uuacaacauaagaauggucuac

SEQ ID NO: 3844 - RNA, 22 nt, Artificial Sequence
  Synthesized RNAi sequence
uuacaagagugagcuguuucag

SEQ ID NO: 3845 - RNA, 22 nt, Artificial Sequence
  Synthesized RNAi sequence
uuacaauaauagcucauaccuc

SEQ ID NO: 3846 - RNA, 22 nt, Artificial Sequence
  Synthesized RNAi sequence
uuacaguacaaaagacauacug

SEQ ID NO: 3847 - RNA, 22 nt, Artificial Sequence
  Synthesized RNAi sequence
uuacauuacaagagugagcugu

SEQ ID NO: 3848 - RNA, 22 nt, Artificial Sequence
  Synthesized RNAi sequence
uuacauuuucagcuuguaaagu

SEQ ID NO: 3849 - RNA, 22 nt, Artificial Sequence
  Synthesized RNAi sequence
uuaccaacuucccaugaaagau

SEQ ID NO: 3850 - RNA, 22 nt, Artificial Sequence
  Synthesized RNAi sequence
uuaccaguaccagguggucccu

SEQ ID NO: 3851 - RNA, 22 nt, Artificial Sequence
  Synthesized RNAi sequence
uuacuguaugugaugucagcac

SEQ ID NO: 3852 - RNA, 22 nt, Artificial Sequence
  Synthesized RNAi sequence
uuagcaaugugcguggugcagg

SEQ ID NO: 3853 - RNA, 22 nt, Artificial Sequence
  Synthesized RNAi sequence
uuagcacguaaucuggcauuga

SEQ ID NO: 3854 - RNA, 22 nt, Artificial Sequence
  Synthesized RNAi sequence
uuagcuaaaauguaaucaccag

SEQ ID NO: 3855 - RNA, 22 nt, Artificial Sequence
  Synthesized RNAi sequence
uuaguuagcaaugugcguggug

SEQ ID NO: 3856 - RNA, 22 nt, Artificial Sequence
  Synthesized RNAi sequence
uuauaaggugaaauaaagacag

SEQ ID NO: 3857 - RNA, 22 nt, Artificial Sequence
  Synthesized RNAi sequence
uuaucauaaaccaaagcacuca

SEQ ID NO: 3858 - RNA, 22 nt, Artificial Sequence
  Synthesized RNAi sequence
uuaucuauaggcaaauauuuua

SEQ ID NO: 3859 - RNA, 22 nt, Artificial Sequence
  Synthesized RNAi sequence
uuaugcaaaguaugccuacuuu

SEQ ID NO: 3860 - RNA, 22 nt, Artificial Sequence
  Synthesized RNAi sequence
uuaugugauguugauaugacau

SEQ ID NO: 3861 - RNA, 22 nt, Artificial Sequence
  Synthesized RNAi sequence
uuaugugauuuacaauaauagc

SEQ ID NO: 3862 - RNA, 22 nt, Artificial Sequence
  Synthesized RNAi sequence
uuaugugcuuuaagcuuauuau

SEQ ID NO: 3863 - RNA, 22 nt, Artificial Sequence
  Synthesized RNAi sequence
uuauuaucauaaaccaaagcac

SEQ ID NO: 3864 - RNA, 22 nt, Artificial Sequence
  Synthesized RNAi sequence
uucaagacuuguaaauugcaac

SEQ ID NO: 3865 - RNA, 22 nt, Artificial Sequence
  Synthesized RNAi sequence
uucacguacaguagcaauacca

SEQ ID NO: 3866 - RNA, 22 nt, Artificial Sequence
  Synthesized RNAi sequence
uucagcaggacaacgccgacaa

SEQ ID NO: 3867 - RNA, 22 nt, Artificial Sequence
  Synthesized RNAi sequence
uucagcuuguaaaguugccaca

SEQ ID NO: 3868 - RNA, 22 nt, Artificial Sequence
  Synthesized RNAi sequence
uucaguacagguguuagcuaaa

SEQ ID NO: 3869 - RNA, 22 nt, Artificial Sequence
  Synthesized RNAi sequence
uucagugguuugagugaauaug

SEQ ID NO: 3870 - RNA, 22 nt, Artificial Sequence
  Synthesized RNAi sequence
uucauaagucuacacacugaau

SEQ ID NO: 3871 - RNA, 22 nt, Artificial Sequence
  Synthesized RNAi sequence
uucaucaaagacaacuauaucu

SEQ ID NO: 3872 - RNA, 22 nt, Artificial Sequence
  Synthesized RNAi sequence
uucccaugaaagauguaauucu

SEQ ID NO: 3873 - RNA, 22 nt, Artificial Sequence
  Synthesized RNAi sequence
uuccgaggaacaugucuggacc

SEQ ID NO: 3874 - RNA, 22 nt, Artificial Sequence
  Synthesized RNAi sequence
uuccuacguggaauuucaagac

SEQ ID NO: 3875 - RNA, 22 nt, Artificial Sequence
  Synthesized RNAi sequence
uucgguuaagugguggucuagg

SEQ ID NO: 3876 - RNA, 22 nt, Artificial Sequence
  Synthesized RNAi sequence
uucuaacauagugcucuugugg

SEQ ID NO: 3877 - RNA, 22 nt, Artificial Sequence
  Synthesized RNAi sequence
uucuacuacauuuaucuauagg

SEQ ID NO: 3878 - RNA, 22 nt, Artificial Sequence
  Synthesized RNAi sequence
uucuagugugcccuuaguuagc

SEQ ID NO: 3879 - RNA, 22 nt, Artificial Sequence
  Synthesized RNAi sequence
uucucugucagacagcacuuca

SEQ ID NO: 3880 - RNA, 22 nt, Artificial Sequence
  Synthesized RNAi sequence
uucugagcccugugaugaauca

SEQ ID NO: 3881 - RNA, 22 nt, Artificial Sequence
  Synthesized RNAi sequence
uucugguucuagugugcccuua

SEQ ID NO: 3882 - RNA, 22 nt, Artificial Sequence
  Synthesized RNAi sequence
uucugugaauuauaaggugaaa

SEQ ID NO: 3883 - RNA, 22 nt, Artificial Sequence
  Synthesized RNAi sequence
uugaaauauucugguucuagug

SEQ ID NO: 3884 - RNA, 22 nt, Artificial Sequence
  Synthesized RNAi sequence
uugacaacacucaaaucauaau

SEQ ID NO: 3885 - RNA, 22 nt, Artificial Sequence
  Synthesized RNAi sequence
uugagcagggucgccaauguac

SEQ ID NO: 3886 - RNA, 22 nt, Artificial Sequence
  Synthesized RNAi sequence
uugagcugauuugucuuuaugu

SEQ ID NO: 3887 - RNA, 22 nt, Artificial Sequence
  Synthesized RNAi sequence
uugaggcuacagcauucuguga

SEQ ID NO: 3888 - RNA, 22 nt, Artificial Sequence
  Synthesized RNAi sequence
uugagucacaucugugacauca

SEQ ID NO: 3889 - RNA, 22 nt, Artificial Sequence
  Synthesized RNAi sequence
uugagugaauaugacauaguca

SEQ ID NO: 3890 - RNA, 22 nt, Artificial Sequence
  Synthesized RNAi sequence
uugaguguuggguauaagccag

SEQ ID NO: 3891 - RNA, 22 nt, Artificial Sequence
  Synthesized RNAi sequence
uugaguugguagucccaaaauc

SEQ ID NO: 3892 - RNA, 22 nt, Artificial Sequence
  Synthesized RNAi sequence
uugauaauuugcaacauugcua

SEQ ID NO: 3893 - RNA, 22 nt, Artificial Sequence
  Synthesized RNAi sequence
uugauaugacauggucguaaca

SEQ ID NO: 3894 - RNA, 22 nt, Artificial Sequence
  Synthesized RNAi sequence
uugcaaacauacggauuaacag

SEQ ID NO: 3895 - RNA, 22 nt, Artificial Sequence
  Synthesized RNAi sequence
uugcaacuugucauaaaggucu

SEQ ID NO: 3896 - RNA, 22 nt, Artificial Sequence
  Synthesized RNAi sequence
uugcagaugaaacaucaugcgu

SEQ ID NO: 3897 - RNA, 22 nt, Artificial Sequence
  Synthesized RNAi sequence
uugcauaccaaccuuuugauaa

SEQ ID NO: 3898 - RNA, 22 nt, Artificial Sequence
  Synthesized RNAi sequence
uugccacauuccuacguggaau

SEQ ID NO: 3899 - RNA, 22 nt, Artificial Sequence
  Synthesized RNAi sequence
uugcuagaaaacucaucugaga

SEQ ID NO: 3900 - RNA, 22 nt, Artificial Sequence
  Synthesized RNAi sequence
uuggguauaagccaguaauucu

SEQ ID NO: 3901 - RNA, 22 nt, Artificial Sequence
  Synthesized RNAi sequence
uugguagucccaaaaucuuuga

SEQ ID NO: 3902 - RNA, 22 nt, Artificial Sequence
  Synthesized RNAi sequence
uuguaaauugcaacuugucaua

SEQ ID NO: 3903 - RNA, 22 nt, Artificial Sequence
  Synthesized RNAi sequence
uuguaaguuguuguaccucggu

SEQ ID NO: 3904 - RNA, 22 nt, Artificial Sequence
  Synthesized RNAi sequence
uuguaccucgguaaacaacagc

SEQ ID NO: 3905 - RNA, 22 nt, Artificial Sequence
  Synthesized RNAi sequence
uugucauaaaggucucuaucag

SEQ ID NO: 3906 - RNA, 22 nt, Artificial Sequence
  Synthesized RNAi sequence
uugucuuuaugugcuuuaagcu

SEQ ID NO: 3907 - RNA, 22 nt, Artificial Sequence
  Synthesized RNAi sequence
uuguggcacuaguguaggugca

SEQ ID NO: 3908 - RNA, 22 nt, Artificial Sequence
  Synthesized RNAi sequence
uuguggccauugaaauuucauc

SEQ ID NO: 3909 - RNA, 22 nt, Artificial Sequence
  Synthesized RNAi sequence
uuguggccuguuaauugcagau

SEQ ID NO: 3910 - RNA, 22 nt, Artificial Sequence
  Synthesized RNAi sequence
uuguuguaccucgguaaacaac

SEQ ID NO: 3911 - RNA, 22 nt, Artificial Sequence
  Synthesized RNAi sequence
uuuaaagcauugagcugauuug

SEQ ID NO: 3912 - RNA, 22 nt, Artificial Sequence
  Synthesized RNAi sequence
uuuaaaugucuccucaguagcu

SEQ ID NO: 3913 - RNA, 22 nt, Artificial Sequence
  Synthesized RNAi sequence
uuuaagcuuauuaucauaaacc

SEQ ID NO: 3914 - RNA, 22 nt, Artificial Sequence
  Synthesized RNAi sequence
uuuaaugccuucucacauagug

SEQ ID NO: 3915 - RNA, 22 nt, Artificial Sequence
  Synthesized RNAi sequence
uuuaauuuguaaguuguuguac

SEQ ID NO: 3916 - RNA, 22 nt, Artificial Sequence
  Synthesized RNAi sequence
uuuacaacauaagaauggucua

SEQ ID NO: 3917 - RNA, 22 nt, Artificial Sequence
  Synthesized RNAi sequence
uuuacaauaauagcucauaccu

SEQ ID NO: 3918 - RNA, 22 nt, Artificial Sequence
  Synthesized RNAi sequence
uuuacaguacaaaagacauacu

SEQ ID NO: 3919 - RNA, 22 nt, Artificial Sequence
  Synthesized RNAi sequence
uuuacauuacaagagugagcug

SEQ ID NO: 3920 - RNA, 22 nt, Artificial Sequence
  Synthesized RNAi sequence
uuuaccaacuucccaugaaaga

SEQ ID NO: 3921 - RNA, 22 nt, Artificial Sequence
  Synthesized RNAi sequence
uuuaugugauguugauaugaca

SEQ ID NO: 3922 - RNA, 22 nt, Artificial Sequence
  Synthesized RNAi sequence
uuuaugugauuuacaauaauag

SEQ ID NO: 3923 - RNA, 22 nt, Artificial Sequence
  Synthesized RNAi sequence
uuuaugugcuuuaagcuuauua

SEQ ID NO: 3924 - RNA, 22 nt, Artificial Sequence
  Synthesized RNAi sequence
uuucaagacuuguaaauugcaa

SEQ ID NO: 3925 - RNA, 22 nt, Artificial Sequence
  Synthesized RNAi sequence
uuucagcaggacaacgccgaca

SEQ ID NO: 3926 - RNA, 22 nt, Artificial Sequence
  Synthesized RNAi sequence
uuucagcuuguaaaguugccac

SEQ ID NO: 3927 - RNA, 22 nt, Artificial Sequence
  Synthesized RNAi sequence
uuucagugguuugagugaauau

SEQ ID NO: 3928 - RNA, 22 nt, Artificial Sequence
  Synthesized RNAi sequence
uuucauaagucuacacacugaa

SEQ ID NO: 3929 - RNA, 22 nt, Artificial Sequence
  Synthesized RNAi sequence
uuucaucaaagacaacuauauc

SEQ ID NO: 3930 - RNA, 22 nt, Artificial Sequence
  Synthesized RNAi sequence
uuucgguuaagugguggucuag

SEQ ID NO: 3931 - RNA, 22 nt, Artificial Sequence
  Synthesized RNAi sequence
uuugaggcuacagcauucugug

SEQ ID NO: 3932 - RNA, 22 nt, Artificial Sequence
  Synthesized RNAi sequence
uuugaguugguagucccaaaau

SEQ ID NO: 3933 - RNA, 22 nt, Artificial Sequence
  Synthesized RNAi sequence
uuugauaauuugcaacauugcu

SEQ ID NO: 3934 - RNA, 22 nt, Artificial Sequence
  Synthesized RNAi sequence
uuugcauaccaaccuuuugaua

SEQ ID NO: 3935 - RNA, 22 nt, Artificial Sequence
  Synthesized RNAi sequence
uuugcucugguaauagcaacau

SEQ ID NO: 3936 - RNA, 22 nt, Artificial Sequence
  Synthesized RNAi sequence
uuuguaaguuguuguaccucgg

SEQ ID NO: 3937 - RNA, 22 nt, Artificial Sequence
  Synthesized RNAi sequence
uuugucuuuaugugcuuuaagc

SEQ ID NO: 3938 - RNA, 22 nt, Artificial Sequence
  Synthesized RNAi sequence
uuuguggccauugaaauuucau

SEQ ID NO: 3939 - RNA, 22 nt, Artificial Sequence
  Synthesized RNAi sequence
uuuuaaagcauugagcugauuu

SEQ ID NO: 3940 - RNA, 22 nt, Artificial Sequence
  Synthesized RNAi sequence
uuuuaaugccuucucacauagu

SEQ ID NO: 3941 - RNA, 22 nt, Artificial Sequence
  Synthesized RNAi sequence
uuuucagcuuguaaaguugcca

SEQ ID NO: 3942 - RNA, 22 nt, Artificial Sequence
  Synthesized RNAi sequence
uuuucauaagucuacacacuga

SEQ ID NO: 3943 - RNA, 22 nt, Artificial Sequence
  Synthesized RNAi sequence
uuuugauaauuugcaacauugc

SEQ ID NO: 3944 - RNA, 22 nt, Artificial Sequence
  Synthesized RNAi sequence
uuuugcauaccaaccuuuugau

SEQ ID NO: 3945 - RNA, 22 nt, Artificial Sequence
  Synthesized RNAi sequence
uuuugcucugguaauagcaaca

SEQ ID NO: 3946 - RNA, 22 nt, Artificial Sequence
  Synthesized RNAi sequence
aaacaggcaaacugaguuggac

SEQ ID NO: 3947 - RNA, 22 nt, Artificial Sequence
  Synthesized RNAi sequence
aaacugaguuggacguguguuu

SEQ ID NO: 3948 - RNA, 22 nt, Artificial Sequence
  Synthesized RNAi sequence
aaagccacguacgagcacgucg

SEQ ID NO: 3949 - RNA, 22 nt, Artificial Sequence
  Synthesized RNAi sequence
aaaucuucauaaggaucagugc

SEQ ID NO: 3950 - RNA, 22 nt, Artificial Sequence
  Synthesized RNAi sequence
aaaugacuuuagaucggcgccg

SEQ ID NO: 3951 - RNA, 22 nt, Artificial Sequence
  Synthesized RNAi sequence
aacacauagggcuguucaaguu

SEQ ID NO: 3952 - RNA, 22 nt, Artificial Sequence
  Synthesized RNAi sequence
aacaccacugcuauguuuagug

SEQ ID NO: 3953 - RNA, 22 nt, Artificial Sequence
  Synthesized RNAi sequence
aacaggcaaacugaguuggacg

SEQ ID NO: 3954 - RNA, 22 nt, Artificial Sequence
  Synthesized RNAi sequence
aacaugaccaugaggugcaguu

SEQ ID NO: 3955 - RNA, 22 nt, Artificial Sequence
  Synthesized RNAi sequence
aaccauaacaugaccaugaggu

SEQ ID NO: 3956 - RNA, 22 nt, Artificial Sequence
  Synthesized RNAi sequence
aaccuugcgguaagccacuggu

SEQ ID NO: 3957 - RNA, 22 nt, Artificial Sequence
  Synthesized RNAi sequence
aacguuugaugaacacauaggg

SEQ ID NO: 3958 - RNA, 22 nt, Artificial Sequence
  Synthesized RNAi sequence
aagaaccuugcgguaagccacu

SEQ ID NO: 3959 - RNA, 22 nt, Artificial Sequence
  Synthesized RNAi sequence
aagaagaaccuugcgguaagcc

SEQ ID NO: 3960 - RNA, 22 nt, Artificial Sequence
  Synthesized RNAi sequence
aagaccuccuccacggagucuc

SEQ ID NO: 3961 - RNA, 22 nt, Artificial Sequence
  Synthesized RNAi sequence
aagauguugacgugccucugau

SEQ ID NO: 3962 - RNA, 22 nt, Artificial Sequence
  Synthesized RNAi sequence
aagccacaagugccaucuuuaa

SEQ ID NO: 3963 - RNA, 22 nt, Artificial Sequence
  Synthesized RNAi sequence
aagccacugguauuucgcccac

SEQ ID NO: 3964 - RNA, 22 nt, Artificial Sequence
  Synthesized RNAi sequence
aagcucacgcaugaguucacgg

SEQ ID NO: 3965 - RNA, 22 nt, Artificial Sequence
  Synthesized RNAi sequence
aagcucgucgccuaagucaaau

SEQ ID NO: 3966 - RNA, 22 nt, Artificial Sequence
  Synthesized RNAi sequence
aaggacaccaagugucucacca

SEQ ID NO: 3967 - RNA, 22 nt, Artificial Sequence
  Synthesized RNAi sequence
aaggaucagugccaagcucguc

SEQ ID NO: 3968 - RNA, 22 nt, Artificial Sequence
  Synthesized RNAi sequence
aagucaaaugacuuuagaucgg

SEQ ID NO: 3969 - RNA, 22 nt, Artificial Sequence
  Synthesized RNAi sequence
aaguuguuaucgacauagcgag

SEQ ID NO: 3970 - RNA, 22 nt, Artificial Sequence
  Synthesized RNAi sequence
aaucuucauaaggaucagugcc

SEQ ID NO: 3971 - RNA, 22 nt, Artificial Sequence
  Synthesized RNAi sequence
aaugacuuuagaucggcgccgu

SEQ ID NO: 3972 - RNA, 22 nt, Artificial Sequence
  Synthesized RNAi sequence
aaugccuucgaguucugcuacc

SEQ ID NO: 3973 - RNA, 22 nt, Artificial Sequence
  Synthesized RNAi sequence
acaaggacaccaagugucucac

SEQ ID NO: 3974 - RNA, 22 nt, Artificial Sequence
  Synthesized RNAi sequence
acaagugccaucuuuaagaugu

SEQ ID NO: 3975 - RNA, 22 nt, Artificial Sequence
  Synthesized RNAi sequence
acacauagggcuguucaaguug

SEQ ID NO: 3976 - RNA, 22 nt, Artificial Sequence
  Synthesized RNAi sequence
acaccaagugucucaccacuac

SEQ ID NO: 3977 - RNA, 22 nt, Artificial Sequence
  Synthesized RNAi sequence
acaccacugcuauguuuagugu

SEQ ID NO: 3978 - RNA, 22 nt, Artificial Sequence
  Synthesized RNAi sequence
acagaaguuguuaucgacauag

SEQ ID NO: 3979 - RNA, 22 nt, Artificial Sequence
  Synthesized RNAi sequence
acaggcaaacugaguuggacgu

SEQ ID NO: 3980 - RNA, 22 nt, Artificial Sequence
  Synthesized RNAi sequence
acauagcgaguguaugccccuc

SEQ ID NO: 3981 - RNA, 22 nt, Artificial Sequence
  Synthesized RNAi sequence
acauagggcuguucaaguugag

SEQ ID NO: 3982 - RNA, 22 nt, Artificial Sequence
  Synthesized RNAi sequence
acaugaccaugaggugcaguuc

SEQ ID NO: 3983 - RNA, 22 nt, Artificial Sequence
  Synthesized RNAi sequence
acaugagggacaaggacaccaa

SEQ ID NO: 3984 - RNA, 22 nt, Artificial Sequence
  Synthesized RNAi sequence
accaagugucucaccacuacga

SEQ ID NO: 3985 - RNA, 22 nt, Artificial Sequence
  Synthesized RNAi sequence
accacugcuauguuuaguguuc

SEQ ID NO: 3986 - RNA, 22 nt, Artificial Sequence
  Synthesized RNAi sequence
accagcucaaccauaacaugac

SEQ ID NO: 3987 - RNA, 22 nt, Artificial Sequence
  Synthesized RNAi sequence
accagcuccuuuauuaccguuc

SEQ ID NO: 3988 - RNA, 22 nt, Artificial Sequence
  Synthesized RNAi sequence
accauaacaugaccaugaggug

SEQ ID NO: 3989 - RNA, 22 nt, Artificial Sequence
  Synthesized RNAi sequence
accaugaggugcaguucgagca

SEQ ID NO: 3990 - RNA, 22 nt, Artificial Sequence
  Synthesized RNAi sequence
accguacugaaugccuucgagu

SEQ ID NO: 3991 - RNA, 22 nt, Artificial Sequence
  Synthesized RNAi sequence
accguucuuacgaagaagaacc

SEQ ID NO: 3992 - RNA, 22 nt, Artificial Sequence
  Synthesized RNAi sequence
accuccuccacggagucuccaa

SEQ ID NO: 3993 - RNA, 22 nt, Artificial Sequence
  Synthesized RNAi sequence
accuguaaaacaggcaaacuga

SEQ ID NO: 3994 - RNA, 22 nt, Artificial Sequence
  Synthesized RNAi sequence
accuugcgguaagccacuggua

SEQ ID NO: 3995 - RNA, 22 nt, Artificial Sequence
  Synthesized RNAi sequence
acgaagaagaaccuugcgguaa

SEQ ID NO: 3996 - RNA, 22 nt, Artificial Sequence
  Synthesized RNAi sequence
acgaccguacugaaugccuucg

SEQ ID NO: 3997 - RNA, 22 nt, Artificial Sequence
  Synthesized RNAi sequence
acgagcacgucgcgaaccugua

SEQ ID NO: 3998 - RNA, 22 nt, Artificial Sequence
  Synthesized RNAi sequence
acgcaugaguucacggguaaca

SEQ ID NO: 3999 - RNA, 22 nt, Artificial Sequence
  Synthesized RNAi sequence
acggagucuccaaagccacgua

SEQ ID NO: 4000 - RNA, 22 nt, Artificial Sequence
  Synthesized RNAi sequence
acggguaacaccacugcuaugu

SEQ ID NO: 4001 - RNA, 22 nt, Artificial Sequence
  Synthesized RNAi sequence
acgucgcgaaccuguaaaacag

SEQ ID NO: 4002 - RNA, 22 nt, Artificial Sequence
  Synthesized RNAi sequence
acgugccucugauaagaccucc

SEQ ID NO: 4003 - RNA, 22 nt, Artificial Sequence
  Synthesized RNAi sequence
acguguguuuucucguugaaac

SEQ ID NO: 4004 - RNA, 22 nt, Artificial Sequence
  Synthesized RNAi sequence
acguuugaugaacacauagggc

SEQ ID NO: 4005 - RNA, 22 nt, Artificial Sequence
  Synthesized RNAi sequence
acuacgaccguacugaaugccu

SEQ ID NO: 4006 - RNA, 22 nt, Artificial Sequence
  Synthesized RNAi sequence
acuauggccaccagcuccuuua

SEQ ID NO: 4007 - RNA, 22 nt, Artificial Sequence
  Synthesized RNAi sequence
acugaaugccuucgaguucugc

SEQ ID NO: 4008 - RNA, 22 nt, Artificial Sequence
  Synthesized RNAi sequence
acugcuauguuuaguguuccag

SEQ ID NO: 4009 - RNA, 22 nt, Artificial Sequence
  Synthesized RNAi sequence
acugguauuucgcccacaugag

SEQ ID NO: 4010 - RNA, 22 nt, Artificial Sequence
  Synthesized RNAi sequence
acuuuagaucggcgccguaacu

SEQ ID NO: 4011 - RNA, 22 nt, Artificial Sequence
  Synthesized RNAi sequence
agaaccuugcgguaagccacug

SEQ ID NO: 4012 - RNA, 22 nt, Artificial Sequence
  Synthesized RNAi sequence
agaagaaccuugcgguaagcca

SEQ ID NO: 4013 - RNA, 22 nt, Artificial Sequence
  Synthesized RNAi sequence
agaaguuguuaucgacauagcg

SEQ ID NO: 4014 - RNA, 22 nt, Artificial Sequence
  Synthesized RNAi sequence
agaucggcgccguaacuauggc

SEQ ID NO: 4015 - RNA, 22 nt, Artificial Sequence
  Synthesized RNAi sequence
agauguugacgugccucugaua

SEQ ID NO: 4016 - RNA, 22 nt, Artificial Sequence
  Synthesized RNAi sequence
agcacgucgcgaaccuguaaaa

SEQ ID NO: 4017 - RNA, 22 nt, Artificial Sequence
  Synthesized RNAi sequence
agcauccgaacguuugaugaac

SEQ ID NO: 4018 - RNA, 22 nt, Artificial Sequence
  Synthesized RNAi sequence
agccacaagugccaucuuuaag

SEQ ID NO: 4019 - RNA, 22 nt, Artificial Sequence
  Synthesized RNAi sequence
agccacugguauuucgcccaca

SEQ ID NO: 4020 - RNA, 22 nt, Artificial Sequence
  Synthesized RNAi sequence
agcgaguguaugccccuccguu

SEQ ID NO: 4021 - RNA, 22 nt, Artificial Sequence
  Synthesized RNAi sequence
agcucaaccauaacaugaccau

SEQ ID NO: 4022 - RNA, 22 nt, Artificial Sequence
  Synthesized RNAi sequence
agcucacgcaugaguucacggg

SEQ ID NO: 4023 - RNA, 22 nt, Artificial Sequence
  Synthesized RNAi sequence
agcuccuuuauuaccguucuua

SEQ ID NO: 4024 - RNA, 22 nt, Artificial Sequence
  Synthesized RNAi sequence
agcucgucgccuaagucaaaug

SEQ ID NO: 4025 - RNA, 22 nt, Artificial Sequence
  Synthesized RNAi sequence
aggacaccaagugucucaccac

SEQ ID NO: 4026 - RNA, 22 nt, Artificial Sequence
  Synthesized RNAi sequence
aggaucagugccaagcucgucg

SEQ ID NO: 4027 - RNA, 22 nt, Artificial Sequence
  Synthesized RNAi sequence
aggcaaacugaguuggacgugu

SEQ ID NO: 4028 - RNA, 22 nt, Artificial Sequence
  Synthesized RNAi sequence
aggugcaguucgagcauccgaa

SEQ ID NO: 4029 - RNA, 22 nt, Artificial Sequence
  Synthesized RNAi sequence
agucaaaugacuuuagaucggc

SEQ ID NO: 4030 - RNA, 22 nt, Artificial Sequence
  Synthesized RNAi sequence
agucuccaaagccacguacgag

SEQ ID NO: 4031 - RNA, 22 nt, Artificial Sequence
  Synthesized RNAi sequence
agugccaagcucgucgccuaag

SEQ ID NO: 4032 - RNA, 22 nt, Artificial Sequence
  Synthesized RNAi sequence
agugccaucuuuaagauguuga

SEQ ID NO: 4033 - RNA, 22 nt, Artificial Sequence
  Synthesized RNAi sequence
aguguaugccccuccguuaagc

SEQ ID NO: 4034 - RNA, 22 nt, Artificial Sequence
  Synthesized RNAi sequence
agugucucaccacuacgaccgu

SEQ ID NO: 4035 - RNA, 22 nt, Artificial Sequence
  Synthesized RNAi sequence
aguguuccaguuuucuugaaaa

SEQ ID NO: 4036 - RNA, 22 nt, Artificial Sequence
  Synthesized RNAi sequence
aguucacggguaacaccacugc

SEQ ID NO: 4037 - RNA, 22 nt, Artificial Sequence
  Synthesized RNAi sequence
aguucgagcauccgaacguuug

SEQ ID NO: 4038 - RNA, 22 nt, Artificial Sequence
  Synthesized RNAi sequence
aguucugcuaccagcucaacca

SEQ ID NO: 4039 - RNA, 22 nt, Artificial Sequence
  Synthesized RNAi sequence
aguuggacguguguuuucucgu

SEQ ID NO: 4040 - RNA, 22 nt, Artificial Sequence
  Synthesized RNAi sequence
aguuguuaucgacauagcgagu

SEQ ID NO: 4041 - RNA, 22 nt, Artificial Sequence
  Synthesized RNAi sequence
aguuuucuugaaaaucuucaua

SEQ ID NO: 4042 - RNA, 22 nt, Artificial Sequence
  Synthesized RNAi sequence
auaacaugaccaugaggugcag

SEQ ID NO: 4043 - RNA, 22 nt, Artificial Sequence
  Synthesized RNAi sequence
auaagaccuccuccacggaguc

SEQ ID NO: 4044 - RNA, 22 nt, Artificial Sequence
  Synthesized RNAi sequence
auagcgaguguaugccccuccg

SEQ ID NO: 4045 - RNA, 22 nt, Artificial Sequence
  Synthesized RNAi sequence
aucagugccaagcucgucgccu

SEQ ID NO: 4046 - RNA, 22 nt, Artificial Sequence
  Synthesized RNAi sequence
auccgaacguuugaugaacaca

SEQ ID NO: 4047 - RNA, 22 nt, Artificial Sequence
  Synthesized RNAi sequence
aucgacauagcgaguguaugcc

SEQ ID NO: 4048 - RNA, 22 nt, Artificial Sequence
  Synthesized RNAi sequence
aucggcgccguaacuauggcca

SEQ ID NO: 4049 - RNA, 22 nt, Artificial Sequence
  Synthesized RNAi sequence
aucuucauaaggaucagugcca

SEQ ID NO: 4050 - RNA, 22 nt, Artificial Sequence
  Synthesized RNAi sequence
aucuuuaagauguugacgugcc

SEQ ID NO: 4051 - RNA, 22 nt, Artificial Sequence
  Synthesized RNAi sequence
augaacacauagggcuguucaa

SEQ ID NO: 4052 - RNA, 22 nt, Artificial Sequence
  Synthesized RNAi sequence
augaccaugaggugcaguucga

SEQ ID NO: 4053 - RNA, 22 nt, Artificial Sequence
  Synthesized RNAi sequence
augacuuuagaucggcgccgua

SEQ ID NO: 4054 - RNA, 22 nt, Artificial Sequence
  Synthesized RNAi sequence
augagggacaaggacaccaagu

SEQ ID NO: 4055 - RNA, 22 nt, Artificial Sequence
  Synthesized RNAi sequence
augaggugcaguucgagcaucc

SEQ ID NO: 4056 - RNA, 22 nt, Artificial Sequence
  Synthesized RNAi sequence
augaguucacggguaacaccac

SEQ ID NO: 4057 - RNA, 22 nt, Artificial Sequence
  Synthesized RNAi sequence
augccccuccguuaagcucacg

SEQ ID NO: 4058 - RNA, 22 nt, Artificial Sequence
  Synthesized RNAi sequence
augccuucgaguucugcuacca

SEQ ID NO: 4059 - RNA, 22 nt, Artificial Sequence
  Synthesized RNAi sequence
auggccaccagcuccuuuauua

SEQ ID NO: 4060 - RNA, 22 nt, Artificial Sequence
  Synthesized RNAi sequence
auguugacgugccucugauaag

SEQ ID NO: 4061 - RNA, 22 nt, Artificial Sequence
  Synthesized RNAi sequence
auguuuaguguuccaguuuucu

SEQ ID NO: 4062 - RNA, 22 nt, Artificial Sequence
  Synthesized RNAi sequence
auuaccguucuuacgaagaaga

SEQ ID NO: 4063 - RNA, 22 nt, Artificial Sequence
  Synthesized RNAi sequence
auuucgcccacaugagggacaa

SEQ ID NO: 4064 - RNA, 22 nt, Artificial Sequence
  Synthesized RNAi sequence
uaaaacaggcaaacugaguugg

SEQ ID NO: 4065 - RNA, 22 nt, Artificial Sequence
  Synthesized RNAi sequence
uaacaccacugcuauguuuagu

SEQ ID NO: 4066 - RNA, 22 nt, Artificial Sequence
  Synthesized RNAi sequence
uaacaugaccaugaggugcagu

SEQ ID NO: 4067 - RNA, 22 nt, Artificial Sequence
  Synthesized RNAi sequence
uaacuauggccaccagcuccuu

SEQ ID NO: 4068 - RNA, 22 nt, Artificial Sequence
  Synthesized RNAi sequence
uaagaccuccuccacggagucu

SEQ ID NO: 4069 - RNA, 22 nt, Artificial Sequence
  Synthesized RNAi sequence
uaagauguugacgugccucuga

SEQ ID NO: 4070 - RNA, 22 nt, Artificial Sequence
  Synthesized RNAi sequence
uaagccacaagugccaucuuua

SEQ ID NO: 4071 - RNA, 22 nt, Artificial Sequence
  Synthesized RNAi sequence
uaagccacugguauuucgccca

SEQ ID NO: 4072 - RNA, 22 nt, Artificial Sequence
  Synthesized RNAi sequence
uaagcucacgcaugaguucacg

SEQ ID NO: 4073 - RNA, 22 nt, Artificial Sequence
  Synthesized RNAi sequence
uaaggaucagugccaagcucgu

SEQ ID NO: 4074 - RNA, 22 nt, Artificial Sequence
  Synthesized RNAi sequence
uaagucaaaugacuuuagaucg

SEQ ID NO: 4075 - RNA, 22 nt, Artificial Sequence
  Synthesized RNAi sequence
uaccagcucaaccauaacauga

SEQ ID NO: 4076 - RNA, 22 nt, Artificial Sequence
  Synthesized RNAi sequence
uaccguucuuacgaagaagaac

SEQ ID NO: 4077 - RNA, 22 nt, Artificial Sequence
  Synthesized RNAi sequence
uacgaagaagaaccuugcggua

SEQ ID NO: 4078 - RNA, 22 nt, Artificial Sequence
  Synthesized RNAi sequence
uacgaccguacugaaugccuuc

SEQ ID NO: 4079 - RNA, 22 nt, Artificial Sequence
  Synthesized RNAi sequence
uacgagcacgucgcgaaccugu

SEQ ID NO: 4080 - RNA, 22 nt, Artificial Sequence
  Synthesized RNAi sequence
uacugaaugccuucgaguucug

SEQ ID NO: 4081 - RNA, 22 nt, Artificial Sequence
  Synthesized RNAi sequence
uagaucggcgccguaacuaugg

SEQ ID NO: 4082 - RNA, 22 nt, Artificial Sequence
  Synthesized RNAi sequence
uagcgaguguaugccccuccgu

SEQ ID NO: 4083 - RNA, 22 nt, Artificial Sequence
  Synthesized RNAi sequence
uaguguuccaguuuucuugaaa

SEQ ID NO: 4084 - RNA, 22 nt, Artificial Sequence
  Synthesized RNAi sequence
uaucgacauagcgaguguaugc

SEQ ID NO: 4085 - RNA, 22 nt, Artificial Sequence
  Synthesized RNAi sequence
uaugccccuccguuaagcucac

SEQ ID NO: 4086 - RNA, 22 nt, Artificial Sequence
  Synthesized RNAi sequence
uauuaccguucuuacgaagaag

SEQ ID NO: 4087 - RNA, 22 nt, Artificial Sequence
  Synthesized RNAi sequence
uauuucgcccacaugagggaca

SEQ ID NO: 4088 - RNA, 22 nt, Artificial Sequence
  Synthesized RNAi sequence
ucaaaugacuuuagaucggcgc

SEQ ID NO: 4089 - RNA, 22 nt, Artificial Sequence
  Synthesized RNAi sequence
ucaaccauaacaugaccaugag

SEQ ID NO: 4090 - RNA, 22 nt, Artificial Sequence
  Synthesized RNAi sequence
ucaccacuacgaccguacugaa

SEQ ID NO: 4091 - RNA, 22 nt, Artificial Sequence
  Synthesized RNAi sequence
ucacgcaugaguucacggguaa

SEQ ID NO: 4092 - RNA, 22 nt, Artificial Sequence
  Synthesized RNAi sequence
ucacggguaacaccacugcuau

SEQ ID NO: 4093 - RNA, 22 nt, Artificial Sequence
  Synthesized RNAi sequence
ucagugccaagcucgucgccua

SEQ ID NO: 4094 - RNA, 22 nt, Artificial Sequence
  Synthesized RNAi sequence
uccaaagccacguacgagcacg

SEQ ID NO: 4095 - RNA, 22 nt, Artificial Sequence
  Synthesized RNAi sequence
uccacggagucuccaaagccac

SEQ ID NO: 4096 - RNA, 22 nt, Artificial Sequence
  Synthesized RNAi sequence
uccaguuuucuugaaaaucuuc

SEQ ID NO: 4097 - RNA, 22 nt, Artificial Sequence
  Synthesized RNAi sequence
uccgaacguuugaugaacacau

SEQ ID NO: 4098 - RNA, 22 nt, Artificial Sequence
  Synthesized RNAi sequence
uccguuaagcucacgcaugagu

SEQ ID NO: 4099 - RNA, 22 nt, Artificial Sequence
  Synthesized RNAi sequence
uccuccacggagucuccaaagc

SEQ ID NO: 4100 - RNA, 22 nt, Artificial Sequence
  Synthesized RNAi sequence
uccuuuauuaccguucuuacga

SEQ ID NO: 4101 - RNA, 22 nt, Artificial Sequence
  Synthesized RNAi sequence
ucgacauagcgaguguaugccc

SEQ ID NO: 4102 - RNA, 22 nt, Artificial Sequence
  Synthesized RNAi sequence
ucgagcauccgaacguuugaug

SEQ ID NO: 4103 - RNA, 22 nt, Artificial Sequence
  Synthesized RNAi sequence
ucgaguucugcuaccagcucaa

SEQ ID NO: 4104 - RNA, 22 nt, Artificial Sequence
  Synthesized RNAi sequence
ucgcccacaugagggacaagga

SEQ ID NO: 4105 - RNA, 22 nt, Artificial Sequence
  Synthesized RNAi sequence
ucgccuaagucaaaugacuuua

SEQ ID NO: 4106 - RNA, 22 nt, Artificial Sequence
  Synthesized RNAi sequence
ucgcgaaccuguaaaacaggca

SEQ ID NO: 4107 - RNA, 22 nt, Artificial Sequence
  Synthesized RNAi sequence
ucgucgccuaagucaaaugacu

SEQ ID NO: 4108 - RNA, 22 nt, Artificial Sequence
  Synthesized RNAi sequence
ucucaccacuacgaccguacug

SEQ ID NO: 4109 - RNA, 22 nt, Artificial Sequence
  Synthesized RNAi sequence
ucuccaaagccacguacgagca

SEQ ID NO: 4110 - RNA, 22 nt, Artificial Sequence
  Synthesized RNAi sequence
ucugauaagaccuccuccacgg

SEQ ID NO: 4111 - RNA, 22 nt, Artificial Sequence
  Synthesized RNAi sequence
ucugcuaccagcucaaccauaa

SEQ ID NO: 4112 - RNA, 22 nt, Artificial Sequence
  Synthesized RNAi sequence
ucuuacgaagaagaaccuugcg

SEQ ID NO: 4113 - RNA, 22 nt, Artificial Sequence
  Synthesized RNAi sequence
ucuucauaaggaucagugccaa

SEQ ID NO: 4114 - RNA, 22 nt, Artificial Sequence
  Synthesized RNAi sequence
ucuugaaaaucuucauaaggau

SEQ ID NO: 4115 - RNA, 22 nt, Artificial Sequence
  Synthesized RNAi sequence
ucuuuaagauguugacgugccu

SEQ ID NO: 4116 - RNA, 22 nt, Artificial Sequence
  Synthesized RNAi sequence
ugaaaaucuucauaaggaucag

SEQ ID NO: 4117 - RNA, 22 nt, Artificial Sequence
  Synthesized RNAi sequence
ugaacacauagggcuguucaag

SEQ ID NO: 4118 - RNA, 22 nt, Artificial Sequence
  Synthesized RNAi sequence
ugaaugccuucgaguucugcua

SEQ ID NO: 4119 - RNA, 22 nt, Artificial Sequence
  Synthesized RNAi sequence
ugaccaugaggugcaguucgag

SEQ ID NO: 4120 - RNA, 22 nt, Artificial Sequence
  Synthesized RNAi sequence
ugacgugccucugauaagaccu

SEQ ID NO: 4121 - RNA, 22 nt, Artificial Sequence
  Synthesized RNAi sequence
ugacuuuagaucggcgccguaa

SEQ ID NO: 4122 - RNA, 22 nt, Artificial Sequence
  Synthesized RNAi sequence
ugagggacaaggacaccaagug

SEQ ID NO: 4123 - RNA, 22 nt, Artificial Sequence
  Synthesized RNAi sequence
ugaggugcaguucgagcauccg

SEQ ID NO: 4124 - RNA, 22 nt, Artificial Sequence
  Synthesized RNAi sequence
ugaguucacggguaacaccacu

SEQ ID NO: 4125 - RNA, 22 nt, Artificial Sequence
  Synthesized RNAi sequence
ugaguuggacguguguuuucuc

SEQ ID NO: 4126 - RNA, 22 nt, Artificial Sequence
  Synthesized RNAi sequence
ugauaagaccuccuccacggag

SEQ ID NO: 4127 - RNA, 22 nt, Artificial Sequence
  Synthesized RNAi sequence
ugcaguucgagcauccgaacgu

SEQ ID NO: 4128 - RNA, 22 nt, Artificial Sequence
  Synthesized RNAi sequence
ugccaagcucgucgccuaaguc

SEQ ID NO: 4129 - RNA, 22 nt, Artificial Sequence
  Synthesized RNAi sequence
ugccaucuuuaagauguugacg

SEQ ID NO: 4130 - RNA, 22 nt, Artificial Sequence
  Synthesized RNAi sequence
ugccucugauaagaccuccucc

SEQ ID NO: 4131 - RNA, 22 nt, Artificial Sequence
  Synthesized RNAi sequence
ugccuucgaguucugcuaccag

SEQ ID NO: 4132 - RNA, 22 nt, Artificial Sequence
  Synthesized RNAi sequence
ugcgguaagccacugguauuuc

SEQ ID NO: 4133 - RNA, 22 nt, Artificial Sequence
  Synthesized RNAi sequence
ugcuaccagcucaaccauaaca

SEQ ID NO: 4134 - RNA, 22 nt, Artificial Sequence
  Synthesized RNAi sequence
ugcuauguuuaguguuccaguu

SEQ ID NO: 4135 - RNA, 22 nt, Artificial Sequence
  Synthesized RNAi sequence
uggacguguguuuucucguuga

SEQ ID NO: 4136 - RNA, 22 nt, Artificial Sequence
  Synthesized RNAi sequence
uggccaccagcuccuuuauuac

SEQ ID NO: 4137 - RNA, 22 nt, Artificial Sequence
  Synthesized RNAi sequence
ugguauuucgcccacaugaggg

SEQ ID NO: 4138 - RNA, 22 nt, Artificial Sequence
  Synthesized RNAi sequence
uguaaaacaggcaaacugaguu

SEQ ID NO: 4139 - RNA, 22 nt, Artificial Sequence
  Synthesized RNAi sequence
uguaugccccuccguuaagcuc

SEQ ID NO: 4140 - RNA, 22 nt, Artificial Sequence
  Synthesized RNAi sequence
ugucucaccacuacgaccguac

SEQ ID NO: 4141 - RNA, 22 nt, Artificial Sequence
  Synthesized RNAi sequence
uguguuuucucguugaaaccag

SEQ ID NO: 4142 - RNA, 22 nt, Artificial Sequence
  Synthesized RNAi sequence
uguuaucgacauagcgagugua

SEQ ID NO: 4143 - RNA, 22 nt, Artificial Sequence
  Synthesized RNAi sequence
uguuccaguuuucuugaaaauc

SEQ ID NO: 4144 - RNA, 22 nt, Artificial Sequence
  Synthesized RNAi sequence
uguugacgugccucugauaaga

SEQ ID NO: 4145 - RNA, 22 nt, Artificial Sequence
  Synthesized RNAi sequence
uguuuaguguuccaguuuucuu

SEQ ID NO: 4146 - RNA, 22 nt, Artificial Sequence
  Synthesized RNAi sequence
uguuuucucguugaaaccaggg

SEQ ID NO: 4147 - RNA, 22 nt, Artificial Sequence
  Synthesized RNAi sequence
uuaagauguugacgugccucug

SEQ ID NO: 4148 - RNA, 22 nt, Artificial Sequence
  Synthesized RNAi sequence
uuaagcucacgcaugaguucac

SEQ ID NO: 4149 - RNA, 22 nt, Artificial Sequence
  Synthesized RNAi sequence
uuaccguucuuacgaagaagaa

SEQ ID NO: 4150 - RNA, 22 nt, Artificial Sequence
  Synthesized RNAi sequence
uuacgaagaagaaccuugcggu

SEQ ID NO: 4151 - RNA, 22 nt, Artificial Sequence
  Synthesized RNAi sequence
uuagaucggcgccguaacuaug

SEQ ID NO: 4152 - RNA, 22 nt, Artificial Sequence
  Synthesized RNAi sequence
uuaguguuccaguuuucuugaa

SEQ ID NO: 4153 - RNA, 22 nt, Artificial Sequence
  Synthesized RNAi sequence
uuaucgacauagcgaguguaug

SEQ ID NO: 4154 - RNA, 22 nt, Artificial Sequence
  Synthesized RNAi sequence
uuauuaccguucuuacgaagaa

SEQ ID NO: 4155 - RNA, 22 nt, Artificial Sequence
  Synthesized RNAi sequence
uucacggguaacaccacugcua

SEQ ID NO: 4156 - RNA, 22 nt, Artificial Sequence
  Synthesized RNAi sequence
uucgagcauccgaacguuugau

SEQ ID NO: 4157 - RNA, 22 nt, Artificial Sequence
  Synthesized RNAi sequence
uucgaguucugcuaccagcuca

SEQ ID NO: 4158 - RNA, 22 nt, Artificial Sequence
  Synthesized RNAi sequence
uucgcccacaugagggacaagg

SEQ ID NO: 4159 - RNA, 22 nt, Artificial Sequence
  Synthesized RNAi sequence
uucugcuaccagcucaaccaua

SEQ ID NO: 4160 - RNA, 22 nt, Artificial Sequence
  Synthesized RNAi sequence
uucuuacgaagaagaaccuugc

SEQ ID NO: 4161 - RNA, 22 nt, Artificial Sequence
  Synthesized RNAi sequence
uucuugaaaaucuucauaagga

SEQ ID NO: 4162 - RNA, 22 nt, Artificial Sequence
  Synthesized RNAi sequence
uugaaaaucuucauaaggauca

SEQ ID NO: 4163 - RNA, 22 nt, Artificial Sequence
  Synthesized RNAi sequence
uugacgugccucugauaagacc

SEQ ID NO: 4164 - RNA, 22 nt, Artificial Sequence
  Synthesized RNAi sequence
uugaugaacacauagggcuguu

SEQ ID NO: 4165 - RNA, 22 nt, Artificial Sequence
  Synthesized RNAi sequence
uugcgguaagccacugguauuu

SEQ ID NO: 4166 - RNA, 22 nt, Artificial Sequence
  Synthesized RNAi sequence
uuggacguguguuuucucguug

SEQ ID NO: 4167 - RNA, 22 nt, Artificial Sequence
  Synthesized RNAi sequence
uuguuaucgacauagcgagugu

SEQ ID NO: 4168 - RNA, 22 nt, Artificial Sequence
  Synthesized RNAi sequence
uuuaagauguugacgugccucu

SEQ ID NO: 4169 - RNA, 22 nt, Artificial Sequence
  Synthesized RNAi sequence
uuuagaucggcgccguaacuau

SEQ ID NO: 4170 - RNA, 22 nt, Artificial Sequence
  Synthesized RNAi sequence
uuuaguguuccaguuuucuuga

SEQ ID NO: 4171 - RNA, 22 nt, Artificial Sequence
  Synthesized RNAi sequence
uuuauuaccguucuuacgaaga

SEQ ID NO: 4172 - RNA, 22 nt, Artificial Sequence
  Synthesized RNAi sequence
uuucgcccacaugagggacaag

SEQ ID NO: 4173 - RNA, 22 nt, Artificial Sequence
  Synthesized RNAi sequence
uuucuugaaaaucuucauaagg

SEQ ID NO: 4174 - RNA, 22 nt, Artificial Sequence
  Synthesized RNAi sequence
uuugaugaacacauagggcugu

SEQ ID NO: 4175 - RNA, 22 nt, Artificial Sequence
  Synthesized RNAi sequence
aaacaagcuaaaguuacuggcc

SEQ ID NO: 4176 - RNA, 22 nt, Artificial Sequence
  Synthesized RNAi sequence
aaacagcagcaagcacaaaaca

SEQ ID NO: 4177 - RNA, 22 nt, Artificial Sequence
  Synthesized RNAi sequence
aaacaucuguugucacuuacug

SEQ ID NO: 4178 - RNA, 22 nt, Artificial Sequence
  Synthesized RNAi sequence
aaaccuauuacuagguuccauu

SEQ ID NO: 4179 - RNA, 22 nt, Artificial Sequence
  Synthesized RNAi sequence
aaaccugagucaccugcuacac

SEQ ID NO: 4180 - RNA, 22 nt, Artificial Sequence
  Synthesized RNAi sequence
aaagaagcaaugaaguagcuga

SEQ ID NO: 4181 - RNA, 22 nt, Artificial Sequence
  Synthesized RNAi sequence
aaagcaauauugucacugcuac

SEQ ID NO: 4182 - RNA, 22 nt, Artificial Sequence
  Synthesized RNAi sequence
aaagcguucgugauguagcaac

SEQ ID NO: 4183 - RNA, 22 nt, Artificial Sequence
  Synthesized RNAi sequence
aaagucaacgagaugaaacauc

SEQ ID NO: 4184 - RNA, 22 nt, Artificial Sequence
  Synthesized RNAi sequence
aaaguuacuggccauaacagcc

SEQ ID NO: 4185 - RNA, 22 nt, Artificial Sequence
  Synthesized RNAi sequence
aaauccauguaaggaauaggaa

SEQ ID NO: 4186 - RNA, 22 nt, Artificial Sequence
  Synthesized RNAi sequence
aaauuguagaagacaaauccau

SEQ ID NO: 4187 - RNA, 22 nt, Artificial Sequence
  Synthesized RNAi sequence
aacaagcuaaaguuacuggcca

SEQ ID NO: 4188 - RNA, 22 nt, Artificial Sequence
  Synthesized RNAi sequence
aacagcagcaagcacaaaacaa

SEQ ID NO: 4189 - RNA, 22 nt, Artificial Sequence
  Synthesized RNAi sequence
aacagccagaggaaaauuaacu

SEQ ID NO: 4190 - RNA, 22 nt, Artificial Sequence
  Synthesized RNAi sequence
aacagugauuucuuuaggcagg

SEQ ID NO: 4191 - RNA, 22 nt, Artificial Sequence
  Synthesized RNAi sequence
aacaucuguugucacuuacugu

SEQ ID NO: 4192 - RNA, 22 nt, Artificial Sequence
  Synthesized RNAi sequence
aaccuauuacuagguuccauug

SEQ ID NO: 4193 - RNA, 22 nt, Artificial Sequence
  Synthesized RNAi sequence
aaccugagucaccugcuacacg

SEQ ID NO: 4194 - RNA, 22 nt, Artificial Sequence
  Synthesized RNAi sequence
aacgagaugaaacaucuguugu

SEQ ID NO: 4195 - RNA, 22 nt, Artificial Sequence
  Synthesized RNAi sequence
aagaaagcguucgugauguagc

SEQ ID NO: 4196 - RNA, 22 nt, Artificial Sequence
  Synthesized RNAi sequence
aagaauguuaguuucuggauug

SEQ ID NO: 4197 - RNA, 22 nt, Artificial Sequence
  Synthesized RNAi sequence
aagacaaauccauguaaggaau

SEQ ID NO: 4198 - RNA, 22 nt, Artificial Sequence
  Synthesized RNAi sequence
aagacaagccauugcgauagca

SEQ ID NO: 4199 - RNA, 22 nt, Artificial Sequence
  Synthesized RNAi sequence
aagauguccacgaaggaucaca

SEQ ID NO: 4200 - RNA, 22 nt, Artificial Sequence
  Synthesized RNAi sequence
aagcaaagcaauauugucacug

SEQ ID NO: 4201 - RNA, 22 nt, Artificial Sequence
  Synthesized RNAi sequence
aagcaauauugucacugcuacu

SEQ ID NO: 4202 - RNA, 22 nt, Artificial Sequence
  Synthesized RNAi sequence
aagcaaugaaguagcugagcca

SEQ ID NO: 4203 - RNA, 22 nt, Artificial Sequence
  Synthesized RNAi sequence
aagcacaaaacaagcuaaaguu

SEQ ID NO: 4204 - RNA, 22 nt, Artificial Sequence
  Synthesized RNAi sequence
aagccauugcgauagcaauucc

SEQ ID NO: 4205 - RNA, 22 nt, Artificial Sequence
  Synthesized RNAi sequence
aagccuacaagacaagccauug

SEQ ID NO: 4206 - RNA, 22 nt, Artificial Sequence
  Synthesized RNAi sequence
aagcggucuggucagaauagug

SEQ ID NO: 4207 - RNA, 22 nt, Artificial Sequence
  Synthesized RNAi sequence
aagcguucgugauguagcaaca

SEQ ID NO: 4208 - RNA, 22 nt, Artificial Sequence
  Synthesized RNAi sequence
aagcucccaauuuguaauaaga

SEQ ID NO: 4209 - RNA, 22 nt, Artificial Sequence
  Synthesized RNAi sequence
aaggaauaggaaaccuauuacu

SEQ ID NO: 4210 - RNA, 22 nt, Artificial Sequence
  Synthesized RNAi sequence
aaggaucacagcuccgauuacg

SEQ ID NO: 4211 - RNA, 22 nt, Artificial Sequence
  Synthesized RNAi sequence
aaguagcugagccacaucaagc

SEQ ID NO: 4212 - RNA, 22 nt, Artificial Sequence
  Synthesized RNAi sequence
aagucaacgagaugaaacaucu

SEQ ID NO: 4213 - RNA, 22 nt, Artificial Sequence
  Synthesized RNAi sequence
aaguuacuggccauaacagcca

SEQ ID NO: 4214 - RNA, 22 nt, Artificial Sequence
  Synthesized RNAi sequence
aauaagaaagcguucgugaugu

SEQ ID NO: 4215 - RNA, 22 nt, Artificial Sequence
  Synthesized RNAi sequence
aauacgaagauguccacgaagg

SEQ ID NO: 4216 - RNA, 22 nt, Artificial Sequence
  Synthesized RNAi sequence
aauaggaaaccuauuacuaggu

SEQ ID NO: 4217 - RNA, 22 nt, Artificial Sequence
  Synthesized RNAi sequence
aauagugccauggaguggcacg

SEQ ID NO: 4218 - RNA, 22 nt, Artificial Sequence
  Synthesized RNAi sequence
aauccauguaaggaauaggaaa

SEQ ID NO: 4219 - RNA, 22 nt, Artificial Sequence
  Synthesized RNAi sequence
aauccuguagcgacuguaugca

SEQ ID NO: 4220 - RNA, 22 nt, Artificial Sequence
  Synthesized RNAi sequence
aaugaaguagcugagccacauc

SEQ ID NO: 4221 - RNA, 22 nt, Artificial Sequence
  Synthesized RNAi sequence
aauggucuguguuuaauuuaua

SEQ ID NO: 4222 - RNA, 22 nt, Artificial Sequence
  Synthesized RNAi sequence
aauguuaguuucuggauugaau

SEQ ID NO: 4223 - RNA, 22 nt, Artificial Sequence
  Synthesized RNAi sequence
aauuguagaagacaaauccaug

SEQ ID NO: 4224 - RNA, 22 nt, Artificial Sequence
  Synthesized RNAi sequence
aauuuauaguugccaauccugu

SEQ ID NO: 4225 - RNA, 22 nt, Artificial Sequence
  Synthesized RNAi sequence
aauuuauucuguaaacagcagc

SEQ ID NO: 4226 - RNA, 22 nt, Artificial Sequence
  Synthesized RNAi sequence
aauuuguaauaagaaagcguuc

SEQ ID NO: 4227 - RNA, 22 nt, Artificial Sequence
  Synthesized RNAi sequence
acaaaacaagcuaaaguuacug

SEQ ID NO: 4228 - RNA, 22 nt, Artificial Sequence
  Synthesized RNAi sequence
acaaauccauguaaggaauagg

SEQ ID NO: 4229 - RNA, 22 nt, Artificial Sequence
  Synthesized RNAi sequence
acaagacaagccauugcgauag

SEQ ID NO: 4230 - RNA, 22 nt, Artificial Sequence
  Synthesized RNAi sequence
acaagcaaagcaauauugucac

SEQ ID NO: 4231 - RNA, 22 nt, Artificial Sequence
  Synthesized RNAi sequence
acaagccauugcgauagcaauu

SEQ ID NO: 4232 - RNA, 22 nt, Artificial Sequence
  Synthesized RNAi sequence
acaagcuaaaguuacuggccau

SEQ ID NO: 4233 - RNA, 22 nt, Artificial Sequence
  Synthesized RNAi sequence
acacgcugcgaagcucccaauu

SEQ ID NO: 4234 - RNA, 22 nt, Artificial Sequence
  Synthesized RNAi sequence
acagcagcaagcacaaaacaag

SEQ ID NO: 4235 - RNA, 22 nt, Artificial Sequence
  Synthesized RNAi sequence
acagcguccuagauggugucca

SEQ ID NO: 4236 - RNA, 22 nt, Artificial Sequence
  Synthesized RNAi sequence
acagcuccgauuacgaguucac

SEQ ID NO: 4237 - RNA, 22 nt, Artificial Sequence
  Synthesized RNAi sequence
acagugauuucuuuaggcaggu

SEQ ID NO: 4238 - RNA, 22 nt, Artificial Sequence
  Synthesized RNAi sequence
acaucaagccuacaagacaagc

SEQ ID NO: 4239 - RNA, 22 nt, Artificial Sequence
  Synthesized RNAi sequence
acaucuguugucacuuacugua

SEQ ID NO: 4240 - RNA, 22 nt, Artificial Sequence
  Synthesized RNAi sequence
accggugauccaauuuauucug

SEQ ID NO: 4241 - RNA, 22 nt, Artificial Sequence
  Synthesized RNAi sequence
accugagucaccugcuacacgc

SEQ ID NO: 4242 - RNA, 22 nt, Artificial Sequence
  Synthesized RNAi sequence
accugcuacacgcugcgaagcu

SEQ ID NO: 4243 - RNA, 22 nt, Artificial Sequence
  Synthesized RNAi sequence
acgaagauguccacgaaggauc

SEQ ID NO: 4244 - RNA, 22 nt, Artificial Sequence
  Synthesized RNAi sequence
acgaaggaucacagcuccgauu

SEQ ID NO: 4245 - RNA, 22 nt, Artificial Sequence
  Synthesized RNAi sequence
acgagaugaaacaucuguuguc

SEQ ID NO: 4246 - RNA, 22 nt, Artificial Sequence
  Synthesized RNAi sequence
acgaguucacuuucuagaagcg

SEQ ID NO: 4247 - RNA, 22 nt, Artificial Sequence
  Synthesized RNAi sequence
acgcugcgaagcucccaauuug

SEQ ID NO: 4248 - RNA, 22 nt, Artificial Sequence
  Synthesized RNAi sequence
acguugagaagaauguuaguuu

SEQ ID NO: 4249 - RNA, 22 nt, Artificial Sequence
  Synthesized RNAi sequence
acugcuacuggaauggucugug

SEQ ID NO: 4250 - RNA, 22 nt, Artificial Sequence
  Synthesized RNAi sequence
acuggaauggucuguguuuaau

SEQ ID NO: 4251 - RNA, 22 nt, Artificial Sequence
  Synthesized RNAi sequence
acuggccauaacagccagagga

SEQ ID NO: 4252 - RNA, 22 nt, Artificial Sequence
  Synthesized RNAi sequence
acuguacaagcaaagcaauauu

SEQ ID NO: 4253 - RNA, 22 nt, Artificial Sequence
  Synthesized RNAi sequence
acuguaugcagcaaaaccugag

SEQ ID NO: 4254 - RNA, 22 nt, Artificial Sequence
  Synthesized RNAi sequence
acuuacuguacaagcaaagcaa

SEQ ID NO: 4255 - RNA, 22 nt, Artificial Sequence
  Synthesized RNAi sequence
acuuucuagaagcggucugguc

SEQ ID NO: 4256 - RNA, 22 nt, Artificial Sequence
  Synthesized RNAi sequence
agaaagcguucgugauguagca

SEQ ID NO: 4257 - RNA, 22 nt, Artificial Sequence
  Synthesized RNAi sequence
agaagaauguuaguuucuggau

SEQ ID NO: 4258 - RNA, 22 nt, Artificial Sequence
  Synthesized RNAi sequence
agaagacaaauccauguaagga

SEQ ID NO: 4259 - RNA, 22 nt, Artificial Sequence
  Synthesized RNAi sequence
agaagcaaugaaguagcugagc

SEQ ID NO: 4260 - RNA, 22 nt, Artificial Sequence
  Synthesized RNAi sequence
agaagcggucuggucagaauag

SEQ ID NO: 4261 - RNA, 22 nt, Artificial Sequence
  Synthesized RNAi sequence
agaauagugccauggaguggca

SEQ ID NO: 4262 - RNA, 22 nt, Artificial Sequence
  Synthesized RNAi sequence
agacaaauccauguaaggaaua

SEQ ID NO: 4263 - RNA, 22 nt, Artificial Sequence
  Synthesized RNAi sequence
agacaagccauugcgauagcaa

SEQ ID NO: 4264 - RNA, 22 nt, Artificial Sequence
  Synthesized RNAi sequence
agaugaaacaucuguugucacu

SEQ ID NO: 4265 - RNA, 22 nt, Artificial Sequence
  Synthesized RNAi sequence
agaugguguccagcaauacgaa

SEQ ID NO: 4266 - RNA, 22 nt, Artificial Sequence
  Synthesized RNAi sequence
agcaaaaccugagucaccugcu

SEQ ID NO: 4267 - RNA, 22 nt, Artificial Sequence
  Synthesized RNAi sequence
agcaaagcaauauugucacugc

SEQ ID NO: 4268 - RNA, 22 nt, Artificial Sequence
  Synthesized RNAi sequence
agcaacagugauuucuuuaggc

SEQ ID NO: 4269 - RNA, 22 nt, Artificial Sequence
  Synthesized RNAi sequence
agcaagcacaaaacaagcuaaa

SEQ ID NO: 4270 - RNA, 22 nt, Artificial Sequence
  Synthesized RNAi sequence
agcaauacgaagauguccacga

SEQ ID NO: 4271 - RNA, 22 nt, Artificial Sequence
  Synthesized RNAi sequence
agcaauauugucacugcuacug

SEQ ID NO: 4272 - RNA, 22 nt, Artificial Sequence
  Synthesized RNAi sequence
agcaaugaaguagcugagccac

SEQ ID NO: 4273 - RNA, 22 nt, Artificial Sequence
  Synthesized RNAi sequence
agcaauuccaccggugauccaa

SEQ ID NO: 4274 - RNA, 22 nt, Artificial Sequence
  Synthesized RNAi sequence
agcacaaaacaagcuaaaguua

SEQ ID NO: 4275 - RNA, 22 nt, Artificial Sequence
  Synthesized RNAi sequence
agcagcaagcacaaaacaagcu

SEQ ID NO: 4276 - RNA, 22 nt, Artificial Sequence
  Synthesized RNAi sequence
agccacaucaagccuacaagac

SEQ ID NO: 4277 - RNA, 22 nt, Artificial Sequence
  Synthesized RNAi sequence
agccauugcgauagcaauucca

SEQ ID NO: 4278 - RNA, 22 nt, Artificial Sequence
  Synthesized RNAi sequence
agccuacaagacaagccauugc

SEQ ID NO: 4279 - RNA, 22 nt, Artificial Sequence
  Synthesized RNAi sequence
agcgacuguaugcagcaaaacc

SEQ ID NO: 4280 - RNA, 22 nt, Artificial Sequence
  Synthesized RNAi sequence
agcggucuggucagaauagugc

SEQ ID NO: 4281 - RNA, 22 nt, Artificial Sequence
  Synthesized RNAi sequence
agcguccuagaugguguccagc

SEQ ID NO: 4282 - RNA, 22 nt, Artificial Sequence
  Synthesized RNAi sequence
agcguucgugauguagcaacag

SEQ ID NO: 4283 - RNA, 22 nt, Artificial Sequence
  Synthesized RNAi sequence
agcuaaaguuacuggccauaac

SEQ ID NO: 4284 - RNA, 22 nt, Artificial Sequence
  Synthesized RNAi sequence
agcucccaauuuguaauaagaa

SEQ ID NO: 4285 - RNA, 22 nt, Artificial Sequence
  Synthesized RNAi sequence
agcuccgauuacgaguucacuu

SEQ ID NO: 4286 - RNA, 22 nt, Artificial Sequence
  Synthesized RNAi sequence
agcugagccacaucaagccuac

SEQ ID NO: 4287 - RNA, 22 nt, Artificial Sequence
  Synthesized RNAi sequence
aggaaaccuauuacuagguucc

SEQ ID NO: 4288 - RNA, 22 nt, Artificial Sequence
  Synthesized RNAi sequence
aggaauaggaaaccuauuacua

SEQ ID NO: 4289 - RNA, 22 nt, Artificial Sequence
  Synthesized RNAi sequence
aggaucacagcuccgauuacga

SEQ ID NO: 4290 - RNA, 22 nt, Artificial Sequence
  Synthesized RNAi sequence
aggcaaauuguagaagacaaau

SEQ ID NO: 4291 - RNA, 22 nt, Artificial Sequence
  Synthesized RNAi sequence
aggcagguccuugaugucacag

SEQ ID NO: 4292 - RNA, 22 nt, Artificial Sequence
  Synthesized RNAi sequence
agguccuugaugucacagcguc

SEQ ID NO: 4293 - RNA, 22 nt, Artificial Sequence
  Synthesized RNAi sequence
aguagcugagccacaucaagcc

SEQ ID NO: 4294 - RNA, 22 nt, Artificial Sequence
  Synthesized RNAi sequence
agucaacgagaugaaacaucug

SEQ ID NO: 4295 - RNA, 22 nt, Artificial Sequence
  Synthesized RNAi sequence
agucaccugcuacacgcugcga

SEQ ID NO: 4296 - RNA, 22 nt, Artificial Sequence
  Synthesized RNAi sequence
agucugaaagaagcaaugaagu

SEQ ID NO: 4297 - RNA, 22 nt, Artificial Sequence
  Synthesized RNAi sequence
agugauuucuuuaggcaggucc

SEQ ID NO: 4298 - RNA, 22 nt, Artificial Sequence
  Synthesized RNAi sequence
agugccauggaguggcacguug

SEQ ID NO: 4299 - RNA, 22 nt, Artificial Sequence
  Synthesized RNAi sequence
aguggcacguugagaagaaugu

SEQ ID NO: 4300 - RNA, 22 nt, Artificial Sequence
  Synthesized RNAi sequence
aguuacuggccauaacagccag

SEQ ID NO: 4301 - RNA, 22 nt, Artificial Sequence
  Synthesized RNAi sequence
aguucacuuucuagaagcgguc

SEQ ID NO: 4302 - RNA, 22 nt, Artificial Sequence
  Synthesized RNAi sequence
aguugccaauccuguagcgacu

SEQ ID NO: 4303 - RNA, 22 nt, Artificial Sequence
  Synthesized RNAi sequence
auaacagccagaggaaaauuaa

SEQ ID NO: 4304 - RNA, 22 nt, Artificial Sequence
  Synthesized RNAi sequence
auaagaaagcguucgugaugua

SEQ ID NO: 4305 - RNA, 22 nt, Artificial Sequence
  Synthesized RNAi sequence
auacgaagauguccacgaagga

SEQ ID NO: 4306 - RNA, 22 nt, Artificial Sequence
  Synthesized RNAi sequence
auagcaauuccaccggugaucc

SEQ ID NO: 4307 - RNA, 22 nt, Artificial Sequence
  Synthesized RNAi sequence
auaggaaaccuauuacuagguu

SEQ ID NO: 4308 - RNA, 22 nt, Artificial Sequence
  Synthesized RNAi sequence
auaggcaaauuguagaagacaa

SEQ ID NO: 4309 - RNA, 22 nt, Artificial Sequence
  Synthesized RNAi sequence
auagugccauggaguggcacgu

SEQ ID NO: 4310 - RNA, 22 nt, Artificial Sequence
  Synthesized RNAi sequence
auaguugccaauccuguagcga

SEQ ID NO: 4311 - RNA, 22 nt, Artificial Sequence
  Synthesized RNAi sequence
auauugucacugcuacuggaau

SEQ ID NO: 4312 - RNA, 22 nt, Artificial Sequence
  Synthesized RNAi sequence
aucaagccuacaagacaagcca

SEQ ID NO: 4313 - RNA, 22 nt, Artificial Sequence
  Synthesized RNAi sequence
aucacagcuccgauuacgaguu

SEQ ID NO: 4314 - RNA, 22 nt, Artificial Sequence
  Synthesized RNAi sequence
auccauguaaggaauaggaaac

SEQ ID NO: 4315 - RNA, 22 nt, Artificial Sequence
  Synthesized RNAi sequence
auccuguagcgacuguaugcag

SEQ ID NO: 4316 - RNA, 22 nt, Artificial Sequence
  Synthesized RNAi sequence
aucuguugucacuuacuguaca

SEQ ID NO: 4317 - RNA, 22 nt, Artificial Sequence
  Synthesized RNAi sequence
augaaacaucuguugucacuua

SEQ ID NO: 4318 - RNA, 22 nt, Artificial Sequence
  Synthesized RNAi sequence
augaaguagcugagccacauca

SEQ ID NO: 4319 - RNA, 22 nt, Artificial Sequence
  Synthesized RNAi sequence
augcagcaaaaccugagucacc

SEQ ID NO: 4320 - RNA, 22 nt, Artificial Sequence
  Synthesized RNAi sequence
auggaguggcacguugagaaga

SEQ ID NO: 4321 - RNA, 22 nt, Artificial Sequence
  Synthesized RNAi sequence
auggucuguguuuaauuuauag

SEQ ID NO: 4322 - RNA, 22 nt, Artificial Sequence
  Synthesized RNAi sequence
augguguccagcaauacgaaga

SEQ ID NO: 4323 - RNA, 22 nt, Artificial Sequence
  Synthesized RNAi sequence
auguaaggaauaggaaaccuau

SEQ ID NO: 4324 - RNA, 22 nt, Artificial Sequence
  Synthesized RNAi sequence
auguagcaacagugauuucuuu

SEQ ID NO: 4325 - RNA, 22 nt, Artificial Sequence
  Synthesized RNAi sequence
augucacagcguccuagauggu

SEQ ID NO: 4326 - RNA, 22 nt, Artificial Sequence
  Synthesized RNAi sequence
auguccacgaaggaucacagcu

SEQ ID NO: 4327 - RNA, 22 nt, Artificial Sequence
  Synthesized RNAi sequence
auuacgaguucacuuucuagaa

SEQ ID NO: 4328 - RNA, 22 nt, Artificial Sequence
  Synthesized RNAi sequence
auuccaccggugauccaauuua

SEQ ID NO: 4329 - RNA, 22 nt, Artificial Sequence
  Synthesized RNAi sequence
auucuguaaacagcagcaagca

SEQ ID NO: 4330 - RNA, 22 nt, Artificial Sequence
  Synthesized RNAi sequence
auugcgauagcaauuccaccgg

SEQ ID NO: 4331 - RNA, 22 nt, Artificial Sequence
  Synthesized RNAi sequence
auuguagaagacaaauccaugu

SEQ ID NO: 4332 - RNA, 22 nt, Artificial Sequence
  Synthesized RNAi sequence
auuuauaguugccaauccugua

SEQ ID NO: 4333 - RNA, 22 nt, Artificial Sequence
  Synthesized RNAi sequence
auuuauucuguaaacagcagca

SEQ ID NO: 4334 - RNA, 22 nt, Artificial Sequence
  Synthesized RNAi sequence
auuucuuuaggcagguccuuga

SEQ ID NO: 4335 - RNA, 22 nt, Artificial Sequence
  Synthesized RNAi sequence
auuuguaauaagaaagcguucg

SEQ ID NO: 4336 - RNA, 22 nt, Artificial Sequence
  Synthesized RNAi sequence
uaaaguuacuggccauaacagc

SEQ ID NO: 4337 - RNA, 22 nt, Artificial Sequence
  Synthesized RNAi sequence
uaacagccagaggaaaauuaac

SEQ ID NO: 4338 - RNA, 22 nt, Artificial Sequence
  Synthesized RNAi sequence
uaagaaagcguucgugauguag

SEQ ID NO: 4339 - RNA, 22 nt, Artificial Sequence
  Synthesized RNAi sequence
uaaggaauaggaaaccuauuac

SEQ ID NO: 4340 - RNA, 22 nt, Artificial Sequence
  Synthesized RNAi sequence
uaauaagaaagcguucgugaug

SEQ ID NO: 4341 - RNA, 22 nt, Artificial Sequence
  Synthesized RNAi sequence
uaauuuauaguugccaauccug

SEQ ID NO: 4342 - RNA, 22 nt, Artificial Sequence
  Synthesized RNAi sequence
uacaagacaagccauugcgaua

SEQ ID NO: 4343 - RNA, 22 nt, Artificial Sequence
  Synthesized RNAi sequence
uacaagcaaagcaauauuguca

SEQ ID NO: 4344 - RNA, 22 nt, Artificial Sequence
  Synthesized RNAi sequence
uacgaagauguccacgaaggau

SEQ ID NO: 4345 - RNA, 22 nt, Artificial Sequence
  Synthesized RNAi sequence
uacgaguucacuuucuagaagc

SEQ ID NO: 4346 - RNA, 22 nt, Artificial Sequence
  Synthesized RNAi sequence
uacuggaauggucuguguuuaa

SEQ ID NO: 4347 - RNA, 22 nt, Artificial Sequence
  Synthesized RNAi sequence
uacuggccauaacagccagagg

SEQ ID NO: 4348 - RNA, 22 nt, Artificial Sequence
  Synthesized RNAi sequence
uacuguacaagcaaagcaauau

SEQ ID NO: 4349 - RNA, 22 nt, Artificial Sequence
  Synthesized RNAi sequence
uagaagacaaauccauguaagg

SEQ ID NO: 4350 - RNA, 22 nt, Artificial Sequence
  Synthesized RNAi sequence
uagaagcggucuggucagaaua

SEQ ID NO: 4351 - RNA, 22 nt, Artificial Sequence
  Synthesized RNAi sequence
uagaugguguccagcaauacga

SEQ ID NO: 4352 - RNA, 22 nt, Artificial Sequence
  Synthesized RNAi sequence
uagcaacagugauuucuuuagg

SEQ ID NO: 4353 - RNA, 22 nt, Artificial Sequence
  Synthesized RNAi sequence
uagcaauuccaccggugaucca

SEQ ID NO: 4354 - RNA, 22 nt, Artificial Sequence
  Synthesized RNAi sequence
uagcgacuguaugcagcaaaac

SEQ ID NO: 4355 - RNA, 22 nt, Artificial Sequence
  Synthesized RNAi sequence
uagcugagccacaucaagccua

SEQ ID NO: 4356 - RNA, 22 nt, Artificial Sequence
  Synthesized RNAi sequence
uaggaaaccuauuacuagguuc

SEQ ID NO: 4357 - RNA, 22 nt, Artificial Sequence
  Synthesized RNAi sequence
uaggcaaauuguagaagacaaa

SEQ ID NO: 4358 - RNA, 22 nt, Artificial Sequence
  Synthesized RNAi sequence
uaggcagguccuugaugucaca

SEQ ID NO: 4359 - RNA, 22 nt, Artificial Sequence
  Synthesized RNAi sequence
uagugccauggaguggcacguu

SEQ ID NO: 4360 - RNA, 22 nt, Artificial Sequence
  Synthesized RNAi sequence
uauaguugccaauccuguagcg

SEQ ID NO: 4361 - RNA, 22 nt, Artificial Sequence
  Synthesized RNAi sequence
uaugcagcaaaaccugagucac

SEQ ID NO: 4362 - RNA, 22 nt, Artificial Sequence
  Synthesized RNAi sequence
uauucuguaaacagcagcaagc

SEQ ID NO: 4363 - RNA, 22 nt, Artificial Sequence
  Synthesized RNAi sequence
ucaacgagaugaaacaucuguu

SEQ ID NO: 4364 - RNA, 22 nt, Artificial Sequence
  Synthesized RNAi sequence
ucaagccuacaagacaagccau

SEQ ID NO: 4365 - RNA, 22 nt, Artificial Sequence
  Synthesized RNAi sequence
ucacagcguccuagaugguguc

SEQ ID NO: 4366 - RNA, 22 nt, Artificial Sequence
  Synthesized RNAi sequence
ucacagcuccgauuacgaguuc

SEQ ID NO: 4367 - RNA, 22 nt, Artificial Sequence
  Synthesized RNAi sequence
ucaccugcuacacgcugcgaag

SEQ ID NO: 4368 - RNA, 22 nt, Artificial Sequence
  Synthesized RNAi sequence
ucacuuacuguacaagcaaagc

SEQ ID NO: 4369 - RNA, 22 nt, Artificial Sequence
  Synthesized RNAi sequence
ucacuuucuagaagcggucugg

SEQ ID NO: 4370 - RNA, 22 nt, Artificial Sequence
  Synthesized RNAi sequence
ucagaauagugccauggagugg

SEQ ID NO: 4371 - RNA, 22 nt, Artificial Sequence
  Synthesized RNAi sequence
uccaccggugauccaauuuauu

SEQ ID NO: 4372 - RNA, 22 nt, Artificial Sequence
  Synthesized RNAi sequence
uccacgaaggaucacagcuccg

SEQ ID NO: 4373 - RNA, 22 nt, Artificial Sequence
  Synthesized RNAi sequence
uccagcaauacgaagaugucca

SEQ ID NO: 4374 - RNA, 22 nt, Artificial Sequence
  Synthesized RNAi sequence
uccauguaaggaauaggaaacc

SEQ ID NO: 4375 - RNA, 22 nt, Artificial Sequence
  Synthesized RNAi sequence
ucccaauuuguaauaagaaagc

SEQ ID NO: 4376 - RNA, 22 nt, Artificial Sequence
  Synthesized RNAi sequence
uccgauuacgaguucacuuucu

SEQ ID NO: 4377 - RNA, 22 nt, Artificial Sequence
  Synthesized RNAi sequence
uccuagaugguguccagcaaua

SEQ ID NO: 4378 - RNA, 22 nt, Artificial Sequence
  Synthesized RNAi sequence
uccuguagcgacuguaugcagc

SEQ ID NO: 4379 - RNA, 22 nt, Artificial Sequence
  Synthesized RNAi sequence
uccuugaugucacagcguccua

SEQ ID NO: 4380 - RNA, 22 nt, Artificial Sequence
  Synthesized RNAi sequence
ucgugauguagcaacagugauu

SEQ ID NO: 4381 - RNA, 22 nt, Artificial Sequence
  Synthesized RNAi sequence
ucuagaagcggucuggucagaa

SEQ ID NO: 4382 - RNA, 22 nt, Artificial Sequence
  Synthesized RNAi sequence
ucugaaagaagcaaugaaguag

SEQ ID NO: 4383 - RNA, 22 nt, Artificial Sequence
  Synthesized RNAi sequence
ucuggucagaauagugccaugg

SEQ ID NO: 4384 - RNA, 22 nt, Artificial Sequence
  Synthesized RNAi sequence
ucuguaaacagcagcaagcaca

SEQ ID NO: 4385 - RNA, 22 nt, Artificial Sequence
  Synthesized RNAi sequence
ucuguguuuaauuuauaguugc

SEQ ID NO: 4386 - RNA, 22 nt, Artificial Sequence
  Synthesized RNAi sequence
ucuguugucacuuacuguacaa

SEQ ID NO: 4387 - RNA, 22 nt, Artificial Sequence
  Synthesized RNAi sequence
ucuuuaggcagguccuugaugu

SEQ ID NO: 4388 - RNA, 22 nt, Artificial Sequence
  Synthesized RNAi sequence
ugaaacaucuguugucacuuac

SEQ ID NO: 4389 - RNA, 22 nt, Artificial Sequence
  Synthesized RNAi sequence
ugaaagaagcaaugaaguagcu

SEQ ID NO: 4390 - RNA, 22 nt, Artificial Sequence
  Synthesized RNAi sequence
ugaaagucaacgagaugaaaca

SEQ ID NO: 4391 - RNA, 22 nt, Artificial Sequence
  Synthesized RNAi sequence
ugaaguagcugagccacaucaa

SEQ ID NO: 4392 - RNA, 22 nt, Artificial Sequence
  Synthesized RNAi sequence
ugagaagaauguuaguuucugg

SEQ ID NO: 4393 - RNA, 22 nt, Artificial Sequence
  Synthesized RNAi sequence
ugagccacaucaagccuacaag

SEQ ID NO: 4394 - RNA, 22 nt, Artificial Sequence
  Synthesized RNAi sequence
ugagucaccugcuacacgcugc

SEQ ID NO: 4395 - RNA, 22 nt, Artificial Sequence
  Synthesized RNAi sequence
ugauccaauuuauucuguaaac

SEQ ID NO: 4396 - RNA, 22 nt, Artificial Sequence
  Synthesized RNAi sequence
ugauguagcaacagugauuucu

SEQ ID NO: 4397 - RNA, 22 nt, Artificial Sequence
  Synthesized RNAi sequence
ugaugucacagcguccuagaug

SEQ ID NO: 4398 - RNA, 22 nt, Artificial Sequence
  Synthesized RNAi sequence
ugauuucuuuaggcagguccuu

SEQ ID NO: 4399 - RNA, 22 nt, Artificial Sequence
  Synthesized RNAi sequence
ugcagcaaaaccugagucaccu

SEQ ID NO: 4400 - RNA, 22 nt, Artificial Sequence
  Synthesized RNAi sequence
ugccaauccuguagcgacugua

SEQ ID NO: 4401 - RNA, 22 nt, Artificial Sequence
  Synthesized RNAi sequence
ugccauggaguggcacguugag

SEQ ID NO: 4402 - RNA, 22 nt, Artificial Sequence
  Synthesized RNAi sequence
ugcgaagcucccaauuuguaau

SEQ ID NO: 4403 - RNA, 22 nt, Artificial Sequence
  Synthesized RNAi sequence
ugcgauagcaauuccaccggug

SEQ ID NO: 4404 - RNA, 22 nt, Artificial Sequence
  Synthesized RNAi sequence
ugcuacuggaauggucuguguu

SEQ ID NO: 4405 - RNA, 22 nt, Artificial Sequence
  Synthesized RNAi sequence
uggaauggucuguguuuaauuu

SEQ ID NO: 4406 - RNA, 22 nt, Artificial Sequence
  Synthesized RNAi sequence
uggaguggcacguugagaagaa

SEQ ID NO: 4407 - RNA, 22 nt, Artificial Sequence
  Synthesized RNAi sequence
uggcauaggcaaauuguagaag

SEQ ID NO: 4408 - RNA, 22 nt, Artificial Sequence
  Synthesized RNAi sequence
uggccauaacagccagaggaaa

SEQ ID NO: 4409 - RNA, 22 nt, Artificial Sequence
  Synthesized RNAi sequence
uggucagaauagugccauggag

SEQ ID NO: 4410 - RNA, 22 nt, Artificial Sequence
  Synthesized RNAi sequence
uggucuguguuuaauuuauagu

SEQ ID NO: 4411 - RNA, 22 nt, Artificial Sequence
  Synthesized RNAi sequence
ugguguccagcaauacgaagau

SEQ ID NO: 4412 - RNA, 22 nt, Artificial Sequence
  Synthesized RNAi sequence
uguaaacagcagcaagcacaaa

SEQ ID NO: 4413 - RNA, 22 nt, Artificial Sequence
  Synthesized RNAi sequence
uguaauaagaaagcguucguga

SEQ ID NO: 4414 - RNA, 22 nt, Artificial Sequence
  Synthesized RNAi sequence
uguacaagcaaagcaauauugu

SEQ ID NO: 4415 - RNA, 22 nt, Artificial Sequence
  Synthesized RNAi sequence
uguagaagacaaauccauguaa

SEQ ID NO: 4416 - RNA, 22 nt, Artificial Sequence
  Synthesized RNAi sequence
uguagcaacagugauuucuuua

SEQ ID NO: 4417 - RNA, 22 nt, Artificial Sequence
  Synthesized RNAi sequence
uguagcgacuguaugcagcaaa

SEQ ID NO: 4418 - RNA, 22 nt, Artificial Sequence
  Synthesized RNAi sequence
uguaugcagcaaaaccugaguc

SEQ ID NO: 4419 - RNA, 22 nt, Artificial Sequence
  Synthesized RNAi sequence
ugucacagcguccuagauggug

SEQ ID NO: 4420 - RNA, 22 nt, Artificial Sequence
  Synthesized RNAi sequence
ugucacugcuacuggaaugguc

SEQ ID NO: 4421 - RNA, 22 nt, Artificial Sequence
  Synthesized RNAi sequence
ugucacuuacuguacaagcaaa

SEQ ID NO: 4422 - RNA, 22 nt, Artificial Sequence
  Synthesized RNAi sequence
uguccacgaaggaucacagcuc

SEQ ID NO: 4423 - RNA, 22 nt, Artificial Sequence
  Synthesized RNAi sequence
uguccagcaauacgaagauguc

SEQ ID NO: 4424 - RNA, 22 nt, Artificial Sequence
  Synthesized RNAi sequence
uguguuuaauuuauaguugcca

SEQ ID NO: 4425 - RNA, 22 nt, Artificial Sequence
  Synthesized RNAi sequence
uguuaguuucuggauugaauga

SEQ ID NO: 4426 - RNA, 22 nt, Artificial Sequence
  Synthesized RNAi sequence
uguugucacuuacuguacaagc

SEQ ID NO: 4427 - RNA, 22 nt, Artificial Sequence
  Synthesized RNAi sequence
uuaauuuauaguugccaauccu

SEQ ID NO: 4428 - RNA, 22 nt, Artificial Sequence
  Synthesized RNAi sequence
uuacgaguucacuuucuagaag

SEQ ID NO: 4429 - RNA, 22 nt, Artificial Sequence
  Synthesized RNAi sequence
uuacuggccauaacagccagag

SEQ ID NO: 4430 - RNA, 22 nt, Artificial Sequence
  Synthesized RNAi sequence
uuacuguacaagcaaagcaaua

SEQ ID NO: 4431 - RNA, 22 nt, Artificial Sequence
  Synthesized RNAi sequence
uuauaguugccaauccuguagc

SEQ ID NO: 4432 - RNA, 22 nt, Artificial Sequence
  Synthesized RNAi sequence
uuauucuguaaacagcagcaag

SEQ ID NO: 4433 - RNA, 22 nt, Artificial Sequence
  Synthesized RNAi sequence
uucacuuucuagaagcggucug

SEQ ID NO: 4434 - RNA, 22 nt, Artificial Sequence
  Synthesized RNAi sequence
uuccaccggugauccaauuuau

SEQ ID NO: 4435 - RNA, 22 nt, Artificial Sequence
  Synthesized RNAi sequence
uucgugauguagcaacagugau

SEQ ID NO: 4436 - RNA, 22 nt, Artificial Sequence
  Synthesized RNAi sequence
uucuagaagcggucuggucaga

SEQ ID NO: 4437 - RNA, 22 nt, Artificial Sequence
  Synthesized RNAi sequence
uucuguaaacagcagcaagcac

SEQ ID NO: 4438 - RNA, 22 nt, Artificial Sequence
  Synthesized RNAi sequence
uucuuuaggcagguccuugaug

SEQ ID NO: 4439 - RNA, 22 nt, Artificial Sequence
  Synthesized RNAi sequence
uugaugucacagcguccuagau

SEQ ID NO: 4440 - RNA, 22 nt, Artificial Sequence
  Synthesized RNAi sequence
uugccaauccuguagcgacugu

SEQ ID NO: 4441 - RNA, 22 nt, Artificial Sequence
  Synthesized RNAi sequence
uugcgauagcaauuccaccggu

SEQ ID NO: 4442 - RNA, 22 nt, Artificial Sequence
  Synthesized RNAi sequence
uuggcauaggcaaauuguagaa

SEQ ID NO: 4443 - RNA, 22 nt, Artificial Sequence
  Synthesized RNAi sequence
uuguaauaagaaagcguucgug

SEQ ID NO: 4444 - RNA, 22 nt, Artificial Sequence
  Synthesized RNAi sequence
uuguagaagacaaauccaugua

SEQ ID NO: 4445 - RNA, 22 nt, Artificial Sequence
  Synthesized RNAi sequence
uuuaauuuauaguugccaaucc

SEQ ID NO: 4446 - RNA, 22 nt, Artificial Sequence
  Synthesized RNAi sequence
uuuauaguugccaauccuguag

SEQ ID NO: 4447 - RNA, 22 nt, Artificial Sequence
  Synthesized RNAi sequence
uuucuagaagcggucuggucag

SEQ ID NO: 4448 - RNA, 22 nt, Artificial Sequence
  Synthesized RNAi sequence
uuucuuuaggcagguccuugau

SEQ ID NO: 4449 - RNA, 22 nt, Artificial Sequence
  Synthesized RNAi sequence
uuuguaauaagaaagcguucgu

SEQ ID NO: 4450 - RNA, 22 nt, Artificial Sequence
  Synthesized RNAi sequence
aaaccuuggggccgacguuguu

SEQ ID NO: 4451 - RNA, 22 nt, Artificial Sequence
  Synthesized RNAi sequence
aaacguaaugcggggugcauuu

SEQ ID NO: 4452 - RNA, 22 nt, Artificial Sequence
  Synthesized RNAi sequence
aaagcaagagcagcaucaccgc

SEQ ID NO: 4453 - RNA, 22 nt, Artificial Sequence
  Synthesized RNAi sequence
aaagcuuguguuacauuguaug

SEQ ID NO: 4454 - RNA, 22 nt, Artificial Sequence
  Synthesized RNAi sequence
aaaugacuugaucuuugaaauu

SEQ ID NO: 4455 - RNA, 22 nt, Artificial Sequence
  Synthesized RNAi sequence
aaauuuggaucuuugucaucca

SEQ ID NO: 4456 - RNA, 22 nt, Artificial Sequence
  Synthesized RNAi sequence
aaccaagacgcaguauuauugg

SEQ ID NO: 4457 - RNA, 22 nt, Artificial Sequence
  Synthesized RNAi sequence
aaccacguucccgaagguguga

SEQ ID NO: 4458 - RNA, 22 nt, Artificial Sequence
  Synthesized RNAi sequence
aacccauaugaugccgucuuug

SEQ ID NO: 4459 - RNA, 22 nt, Artificial Sequence
  Synthesized RNAi sequence
aaccuuggggccgacguuguuu

SEQ ID NO: 4460 - RNA, 22 nt, Artificial Sequence
  Synthesized RNAi sequence
aacgagaagaggcuugacugcc

SEQ ID NO: 4461 - RNA, 22 nt, Artificial Sequence
  Synthesized RNAi sequence
aacguaaugcggggugcauuuc

SEQ ID NO: 4462 - RNA, 22 nt, Artificial Sequence
  Synthesized RNAi sequence
aacuguugcgacuacgugauga

SEQ ID NO: 4463 - RNA, 22 nt, Artificial Sequence
  Synthesized RNAi sequence
aagaagagucacaguuugcugu

SEQ ID NO: 4464 - RNA, 22 nt, Artificial Sequence
  Synthesized RNAi sequence
aagacgcaguauuauuggguaa

SEQ ID NO: 4465 - RNA, 22 nt, Artificial Sequence
  Synthesized RNAi sequence
aagaggcuugacugccgccucu

SEQ ID NO: 4466 - RNA, 22 nt, Artificial Sequence
  Synthesized RNAi sequence
aagcaagagcagcaucaccgcc

SEQ ID NO: 4467 - RNA, 22 nt, Artificial Sequence
  Synthesized RNAi sequence
aagcagcagcaaagcaagagca

SEQ ID NO: 4468 - RNA, 22 nt, Artificial Sequence
  Synthesized RNAi sequence
aagccucagcagcagauuucuu

SEQ ID NO: 4469 - RNA, 22 nt, Artificial Sequence
  Synthesized RNAi sequence
aagccuuuuggcaauguuguuc

SEQ ID NO: 4470 - RNA, 22 nt, Artificial Sequence
  Synthesized RNAi sequence
aagcugguucaaucugucaagc

SEQ ID NO: 4471 - RNA, 22 nt, Artificial Sequence
  Synthesized RNAi sequence
aagcuuguguuacauuguaugc

SEQ ID NO: 4472 - RNA, 22 nt, Artificial Sequence
  Synthesized RNAi sequence
aaggcucccucaguugcaaccc

SEQ ID NO: 4473 - RNA, 22 nt, Artificial Sequence
  Synthesized RNAi sequence
aaguccagcuucuggcccaguu

SEQ ID NO: 4474 - RNA, 22 nt, Artificial Sequence
  Synthesized RNAi sequence
aaguuguagcacgauugcagca

SEQ ID NO: 4475 - RNA, 22 nt, Artificial Sequence
  Synthesized RNAi sequence
aauaccaucuuggacugagauc

SEQ ID NO: 4476 - RNA, 22 nt, Artificial Sequence
  Synthesized RNAi sequence
aaucaguuccuugucugauuag

SEQ ID NO: 4477 - RNA, 22 nt, Artificial Sequence
  Synthesized RNAi sequence
aaucugaggguccaccaaacgu

SEQ ID NO: 4478 - RNA, 22 nt, Artificial Sequence
  Synthesized RNAi sequence
aaucugucaagcagcagcaaag

SEQ ID NO: 4479 - RNA, 22 nt, Artificial Sequence
  Synthesized RNAi sequence
aaugacuugaucuuugaaauuu

SEQ ID NO: 4480 - RNA, 22 nt, Artificial Sequence
  Synthesized RNAi sequence
aaugcgcgacauuccgaagaac

SEQ ID NO: 4481 - RNA, 22 nt, Artificial Sequence
  Synthesized RNAi sequence
aaugcggggugcauuucgcuga

SEQ ID NO: 4482 - RNA, 22 nt, Artificial Sequence
  Synthesized RNAi sequence
aaugugaucuuuugguguauuc

SEQ ID NO: 4483 - RNA, 22 nt, Artificial Sequence
  Synthesized RNAi sequence
aauguuguuccuugaggaaguu

SEQ ID NO: 4484 - RNA, 22 nt, Artificial Sequence
  Synthesized RNAi sequence
aauguuuguaaucaguuccuug

SEQ ID NO: 4485 - RNA, 22 nt, Artificial Sequence
  Synthesized RNAi sequence
aauguuuuguaugcgucaauau

SEQ ID NO: 4486 - RNA, 22 nt, Artificial Sequence
  Synthesized RNAi sequence
aauuuccuuggguuuguucugg

SEQ ID NO: 4487 - RNA, 22 nt, Artificial Sequence
  Synthesized RNAi sequence
aauuucuugaacuguugcgacu

SEQ ID NO: 4488 - RNA, 22 nt, Artificial Sequence
  Synthesized RNAi sequence
aauuugauggcaccuguguagg

SEQ ID NO: 4489 - RNA, 22 nt, Artificial Sequence
  Synthesized RNAi sequence
aauuuggucaucuggacugcua

SEQ ID NO: 4490 - RNA, 22 nt, Artificial Sequence
  Synthesized RNAi sequence
acaguuugcuguuucuucuguc

SEQ ID NO: 4491 - RNA, 22 nt, Artificial Sequence
  Synthesized RNAi sequence
acauuuugcucucaagcugguu

SEQ ID NO: 4492 - RNA, 22 nt, Artificial Sequence
  Synthesized RNAi sequence
accaaacguaaugcggggugca

SEQ ID NO: 4493 - RNA, 22 nt, Artificial Sequence
  Synthesized RNAi sequence
accaagacgcaguauuauuggg

SEQ ID NO: 4494 - RNA, 22 nt, Artificial Sequence
  Synthesized RNAi sequence
accacgucugccgaaagcuugu

SEQ ID NO: 4495 - RNA, 22 nt, Artificial Sequence
  Synthesized RNAi sequence
accacguucccgaaggugugac

SEQ ID NO: 4496 - RNA, 22 nt, Artificial Sequence
  Synthesized RNAi sequence
accagacauuuugcucucaagc

SEQ ID NO: 4497 - RNA, 22 nt, Artificial Sequence
  Synthesized RNAi sequence
accauagggaaguccagcuucu

SEQ ID NO: 4498 - RNA, 22 nt, Artificial Sequence
  Synthesized RNAi sequence
accaucuuggacugagaucuuu

SEQ ID NO: 4499 - RNA, 22 nt, Artificial Sequence
  Synthesized RNAi sequence
acccauaugaugccgucuuugu

SEQ ID NO: 4500 - RNA, 22 nt, Artificial Sequence
  Synthesized RNAi sequence
accgccauugccagccauucua

SEQ ID NO: 4501 - RNA, 22 nt, Artificial Sequence
  Synthesized RNAi sequence
accuguguaggucaaccacguu

SEQ ID NO: 4502 - RNA, 22 nt, Artificial Sequence
  Synthesized RNAi sequence
acgagaagaggcuugacugccg

SEQ ID NO: 4503 - RNA, 22 nt, Artificial Sequence
  Synthesized RNAi sequence
acgauugcagcauuguuagcag

SEQ ID NO: 4504 - RNA, 22 nt, Artificial Sequence
  Synthesized RNAi sequence
acgcaguauuauuggguaaacc

SEQ ID NO: 4505 - RNA, 22 nt, Artificial Sequence
  Synthesized RNAi sequence
acguaaugcggggugcauuucg

SEQ ID NO: 4506 - RNA, 22 nt, Artificial Sequence
  Synthesized RNAi sequence
acgucugccgaaagcuuguguu

SEQ ID NO: 4507 - RNA, 22 nt, Artificial Sequence
  Synthesized RNAi sequence
acgugaugaggaacgagaagag

SEQ ID NO: 4508 - RNA, 22 nt, Artificial Sequence
  Synthesized RNAi sequence
acguucccgaaggugugacuuc

SEQ ID NO: 4509 - RNA, 22 nt, Artificial Sequence
  Synthesized RNAi sequence
acguuguuuugaucgcgcccca

SEQ ID NO: 4510 - RNA, 22 nt, Artificial Sequence
  Synthesized RNAi sequence
acuacgugaugaggaacgagaa

SEQ ID NO: 4511 - RNA, 22 nt, Artificial Sequence
  Synthesized RNAi sequence
acugagaucuuucauuuuaccg

SEQ ID NO: 4512 - RNA, 22 nt, Artificial Sequence
  Synthesized RNAi sequence
acugccaguugaaucugagggu

SEQ ID NO: 4513 - RNA, 22 nt, Artificial Sequence
  Synthesized RNAi sequence
acugcguucuccauucugguua

SEQ ID NO: 4514 - RNA, 22 nt, Artificial Sequence
  Synthesized RNAi sequence
acugcuauugguguuaauugga

SEQ ID NO: 4515 - RNA, 22 nt, Artificial Sequence
  Synthesized RNAi sequence
acugcugccuggaguugaauuu

SEQ ID NO: 4516 - RNA, 22 nt, Artificial Sequence
  Synthesized RNAi sequence
acuguugcgacuacgugaugag

SEQ ID NO: 4517 - RNA, 22 nt, Artificial Sequence
  Synthesized RNAi sequence
acuuccaugccaaugcgcgaca

SEQ ID NO: 4518 - RNA, 22 nt, Artificial Sequence
  Synthesized RNAi sequence
acuugaucuuugaaauuuggau

SEQ ID NO: 4519 - RNA, 22 nt, Artificial Sequence
  Synthesized RNAi sequence
agaaauaccaucuuggacugag

SEQ ID NO: 4520 - RNA, 22 nt, Artificial Sequence
  Synthesized RNAi sequence
agaagaggcuugacugccgccu

SEQ ID NO: 4521 - RNA, 22 nt, Artificial Sequence
  Synthesized RNAi sequence
agaagagucacaguuugcuguu

SEQ ID NO: 4522 - RNA, 22 nt, Artificial Sequence
  Synthesized RNAi sequence
agaagccucagcagcagauuuc

SEQ ID NO: 4523 - RNA, 22 nt, Artificial Sequence
  Synthesized RNAi sequence
agaagccuuuuggcaauguugu

SEQ ID NO: 4524 - RNA, 22 nt, Artificial Sequence
  Synthesized RNAi sequence
agaaguuccccuacugcugccu

SEQ ID NO: 4525 - RNA, 22 nt, Artificial Sequence
  Synthesized RNAi sequence
agacauuuugcucucaagcugg

SEQ ID NO: 4526 - RNA, 22 nt, Artificial Sequence
  Synthesized RNAi sequence
agacgcaguauuauuggguaaa

SEQ ID NO: 4527 - RNA, 22 nt, Artificial Sequence
  Synthesized RNAi sequence
agagcagcaucaccgccauugc

SEQ ID NO: 4528 - RNA, 22 nt, Artificial Sequence
  Synthesized RNAi sequence
agagcggugaaccaagacgcag

SEQ ID NO: 4529 - RNA, 22 nt, Artificial Sequence
  Synthesized RNAi sequence
agagucacaguuugcuguuucu

SEQ ID NO: 4530 - RNA, 22 nt, Artificial Sequence
  Synthesized RNAi sequence
agauuucuuagugacaguuugg

SEQ ID NO: 4531 - RNA, 22 nt, Artificial Sequence
  Synthesized RNAi sequence
agcaaagcaagagcagcaucac

SEQ ID NO: 4532 - RNA, 22 nt, Artificial Sequence
  Synthesized RNAi sequence
agcaagagcagcaucaccgcca

SEQ ID NO: 4533 - RNA, 22 nt, Artificial Sequence
  Synthesized RNAi sequence
agcaccauagggaaguccagcu

SEQ ID NO: 4534 - RNA, 22 nt, Artificial Sequence
  Synthesized RNAi sequence
agcacgauugcagcauuguuag

SEQ ID NO: 4535 - RNA, 22 nt, Artificial Sequence
  Synthesized RNAi sequence
agcagauuucuuagugacaguu

SEQ ID NO: 4536 - RNA, 22 nt, Artificial Sequence
  Synthesized RNAi sequence
agcagcaaagcaagagcagcau

SEQ ID NO: 4537 - RNA, 22 nt, Artificial Sequence
  Synthesized RNAi sequence
agcagcagauuucuuagugaca

SEQ ID NO: 4538 - RNA, 22 nt, Artificial Sequence
  Synthesized RNAi sequence
agcagcaucaccgccauugcca

SEQ ID NO: 4539 - RNA, 22 nt, Artificial Sequence
  Synthesized RNAi sequence
agcaggaagaagagucacaguu

SEQ ID NO: 4540 - RNA, 22 nt, Artificial Sequence
  Synthesized RNAi sequence
agcaggagaaguuccccuacug

SEQ ID NO: 4541 - RNA, 22 nt, Artificial Sequence
  Synthesized RNAi sequence
agcaggauugcgggugccaaug

SEQ ID NO: 4542 - RNA, 22 nt, Artificial Sequence
  Synthesized RNAi sequence
agcauuguuagcaggauugcgg

SEQ ID NO: 4543 - RNA, 22 nt, Artificial Sequence
  Synthesized RNAi sequence
agccaauuuggucaucuggacu

SEQ ID NO: 4544 - RNA, 22 nt, Artificial Sequence
  Synthesized RNAi sequence
agccauucuagcaggagaaguu

SEQ ID NO: 4545 - RNA, 22 nt, Artificial Sequence
  Synthesized RNAi sequence
agcccaucugccuugugugguc

SEQ ID NO: 4546 - RNA, 22 nt, Artificial Sequence
  Synthesized RNAi sequence
agccucagcagcagauuucuua

SEQ ID NO: 4547 - RNA, 22 nt, Artificial Sequence
  Synthesized RNAi sequence
agccuuuuggcaauguuguucc

SEQ ID NO: 4548 - RNA, 22 nt, Artificial Sequence
  Synthesized RNAi sequence
agcggugaaccaagacgcagua

SEQ ID NO: 4549 - RNA, 22 nt, Artificial Sequence
  Synthesized RNAi sequence
agcugguucaaucugucaagca

SEQ ID NO: 4550 - RNA, 22 nt, Artificial Sequence
  Synthesized RNAi sequence
agcuucuggcccaguuccuagg

SEQ ID NO: 4551 - RNA, 22 nt, Artificial Sequence
  Synthesized RNAi sequence
agcuuguguuacauuguaugcu

SEQ ID NO: 4552 - RNA, 22 nt, Artificial Sequence
  Synthesized RNAi sequence
aggaacgagaagaggcuugacu

SEQ ID NO: 4553 - RNA, 22 nt, Artificial Sequence
  Synthesized RNAi sequence
aggaagaagagucacaguuugc

SEQ ID NO: 4554 - RNA, 22 nt, Artificial Sequence
  Synthesized RNAi sequence
aggaaguuguagcacgauugca

SEQ ID NO: 4555 - RNA, 22 nt, Artificial Sequence
  Synthesized RNAi sequence
aggagaaguuccccuacugcug

SEQ ID NO: 4556 - RNA, 22 nt, Artificial Sequence
  Synthesized RNAi sequence
aggccugaguugagucagcacu

SEQ ID NO: 4557 - RNA, 22 nt, Artificial Sequence
  Synthesized RNAi sequence
aggcucccucaguugcaaccca

SEQ ID NO: 4558 - RNA, 22 nt, Artificial Sequence
  Synthesized RNAi sequence
aggguccaccaaacguaaugcg

SEQ ID NO: 4559 - RNA, 22 nt, Artificial Sequence
  Synthesized RNAi sequence
agguaguagaaauaccaucuug

SEQ ID NO: 4560 - RNA, 22 nt, Artificial Sequence
  Synthesized RNAi sequence
aggucaaccacguucccgaagg

SEQ ID NO: 4561 - RNA, 22 nt, Artificial Sequence
  Synthesized RNAi sequence
aggugugacuuccaugccaaug

SEQ ID NO: 4562 - RNA, 22 nt, Artificial Sequence
  Synthesized RNAi sequence
aguagaaauaccaucuuggacu

SEQ ID NO: 4563 - RNA, 22 nt, Artificial Sequence
  Synthesized RNAi sequence
aguagccaauuuggucaucugg

SEQ ID NO: 4564 - RNA, 22 nt, Artificial Sequence
  Synthesized RNAi sequence
aguauuauuggguaaaccuugg

SEQ ID NO: 4565 - RNA, 22 nt, Artificial Sequence
  Synthesized RNAi sequence
agucacaguuugcuguuucuuc

SEQ ID NO: 4566 - RNA, 22 nt, Artificial Sequence
  Synthesized RNAi sequence
aguccagcuucuggcccaguuc

SEQ ID NO: 4567 - RNA, 22 nt, Artificial Sequence
  Synthesized RNAi sequence
agugacaguuuggccuuguugu

SEQ ID NO: 4568 - RNA, 22 nt, Artificial Sequence
  Synthesized RNAi sequence
aguuccuagguaguagaaauac

SEQ ID NO: 4569 - RNA, 22 nt, Artificial Sequence
  Synthesized RNAi sequence
aguuccugguccccaaaauuuc

SEQ ID NO: 4570 - RNA, 22 nt, Artificial Sequence
  Synthesized RNAi sequence
aguuccuugucugauuaguucc

SEQ ID NO: 4571 - RNA, 22 nt, Artificial Sequence
  Synthesized RNAi sequence
aguugaaucugaggguccacca

SEQ ID NO: 4572 - RNA, 22 nt, Artificial Sequence
  Synthesized RNAi sequence
aguugaauuucuugaacuguug

SEQ ID NO: 4573 - RNA, 22 nt, Artificial Sequence
  Synthesized RNAi sequence
aguugcaacccauaugaugccg

SEQ ID NO: 4574 - RNA, 22 nt, Artificial Sequence
  Synthesized RNAi sequence
aguuguagcacgauugcagcau

SEQ ID NO: 4575 - RNA, 22 nt, Artificial Sequence
  Synthesized RNAi sequence
aguuuaggccugaguugaguca

SEQ ID NO: 4576 - RNA, 22 nt, Artificial Sequence
  Synthesized RNAi sequence
auaccaucuuggacugagaucu

SEQ ID NO: 4577 - RNA, 22 nt, Artificial Sequence
  Synthesized RNAi sequence
auagcccaucugccuugugugg

SEQ ID NO: 4578 - RNA, 22 nt, Artificial Sequence
  Synthesized RNAi sequence
auauagcccaucugccuugugu

SEQ ID NO: 4579 - RNA, 22 nt, Artificial Sequence
  Synthesized RNAi sequence
auaugaugccgucuuuguuagc

SEQ ID NO: 4580 - RNA, 22 nt, Artificial Sequence
  Synthesized RNAi sequence
auaugcuuauucagcaaaauga

SEQ ID NO: 4581 - RNA, 22 nt, Artificial Sequence
  Synthesized RNAi sequence
aucaccgccauugccagccauu

SEQ ID NO: 4582 - RNA, 22 nt, Artificial Sequence
  Synthesized RNAi sequence
aucaguuccuugucugauuagu

SEQ ID NO: 4583 - RNA, 22 nt, Artificial Sequence
  Synthesized RNAi sequence
aucauccaaaucugcagcagga

SEQ ID NO: 4584 - RNA, 22 nt, Artificial Sequence
  Synthesized RNAi sequence
auccaaaucugcagcaggaaga

SEQ ID NO: 4585 - RNA, 22 nt, Artificial Sequence
  Synthesized RNAi sequence
auccaauuugauggcaccugug

SEQ ID NO: 4586 - RNA, 22 nt, Artificial Sequence
  Synthesized RNAi sequence
aucugaggguccaccaaacgua

SEQ ID NO: 4587 - RNA, 22 nt, Artificial Sequence
  Synthesized RNAi sequence
aucugccuuguguggucugcau

SEQ ID NO: 4588 - RNA, 22 nt, Artificial Sequence
  Synthesized RNAi sequence
aucuggacugcuauugguguua

SEQ ID NO: 4589 - RNA, 22 nt, Artificial Sequence
  Synthesized RNAi sequence
aucugucaagcagcagcaaagc

SEQ ID NO: 4590 - RNA, 22 nt, Artificial Sequence
  Synthesized RNAi sequence
aucuuggacugagaucuuucau

SEQ ID NO: 4591 - RNA, 22 nt, Artificial Sequence
  Synthesized RNAi sequence
aucuuugaaauuuggaucuuug

SEQ ID NO: 4592 - RNA, 22 nt, Artificial Sequence
  Synthesized RNAi sequence
aucuuugucauccaauuugaug

SEQ ID NO: 4593 - RNA, 22 nt, Artificial Sequence
  Synthesized RNAi sequence
aucuuuugguguauucaaggcu

SEQ ID NO: 4594 - RNA, 22 nt, Artificial Sequence
  Synthesized RNAi sequence
augacuugaucuuugaaauuug

SEQ ID NO: 4595 - RNA, 22 nt, Artificial Sequence
  Synthesized RNAi sequence
augaguuuaggccugaguugag

SEQ ID NO: 4596 - RNA, 22 nt, Artificial Sequence
  Synthesized RNAi sequence
augaugccgucuuuguuagcac

SEQ ID NO: 4597 - RNA, 22 nt, Artificial Sequence
  Synthesized RNAi sequence
augccaaugcgcgacauuccga

SEQ ID NO: 4598 - RNA, 22 nt, Artificial Sequence
  Synthesized RNAi sequence
augccgucuuuguuagcaccau

SEQ ID NO: 4599 - RNA, 22 nt, Artificial Sequence
  Synthesized RNAi sequence
augcgcgacauuccgaagaacg

SEQ ID NO: 4600 - RNA, 22 nt, Artificial Sequence
  Synthesized RNAi sequence
augcggggugcauuucgcugau

SEQ ID NO: 4601 - RNA, 22 nt, Artificial Sequence
  Synthesized RNAi sequence
augcgucaauaugcuuauucag

SEQ ID NO: 4602 - RNA, 22 nt, Artificial Sequence
  Synthesized RNAi sequence
augcuuauucagcaaaaugacu

SEQ ID NO: 4603 - RNA, 22 nt, Artificial Sequence
  Synthesized RNAi sequence
auggcaccuguguaggucaacc

SEQ ID NO: 4604 - RNA, 22 nt, Artificial Sequence
  Synthesized RNAi sequence
augugaucuuuugguguauuca

SEQ ID NO: 4605 - RNA, 22 nt, Artificial Sequence
  Synthesized RNAi sequence
auguugagugagagcggugaac

SEQ ID NO: 4606 - RNA, 22 nt, Artificial Sequence
  Synthesized RNAi sequence
auguuguuccuugaggaaguug

SEQ ID NO: 4607 - RNA, 22 nt, Artificial Sequence
  Synthesized RNAi sequence
auguuuguaaucaguuccuugu

SEQ ID NO: 4608 - RNA, 22 nt, Artificial Sequence
  Synthesized RNAi sequence
auuaguuccugguccccaaaau

SEQ ID NO: 4609 - RNA, 22 nt, Artificial Sequence
  Synthesized RNAi sequence
auuauuggguaaaccuuggggc

SEQ ID NO: 4610 - RNA, 22 nt, Artificial Sequence
  Synthesized RNAi sequence
auucaaggcucccucaguugca

SEQ ID NO: 4611 - RNA, 22 nt, Artificial Sequence
  Synthesized RNAi sequence
auucagcaaaaugacuugaucu

SEQ ID NO: 4612 - RNA, 22 nt, Artificial Sequence
  Synthesized RNAi sequence
auucuagcaggagaaguucccc

SEQ ID NO: 4613 - RNA, 22 nt, Artificial Sequence
  Synthesized RNAi sequence
auucugguuacugccaguugaa

SEQ ID NO: 4614 - RNA, 22 nt, Artificial Sequence
  Synthesized RNAi sequence
auugcagcauuguuagcaggau

SEQ ID NO: 4615 - RNA, 22 nt, Artificial Sequence
  Synthesized RNAi sequence
auugccagccauucuagcagga

SEQ ID NO: 4616 - RNA, 22 nt, Artificial Sequence
  Synthesized RNAi sequence
auugcgggugccaaugugaucu

SEQ ID NO: 4617 - RNA, 22 nt, Artificial Sequence
  Synthesized RNAi sequence
auuggguaaaccuuggggccga

SEQ ID NO: 4618 - RNA, 22 nt, Artificial Sequence
  Synthesized RNAi sequence
auuguuagcaggauugcgggug

SEQ ID NO: 4619 - RNA, 22 nt, Artificial Sequence
  Synthesized RNAi sequence
auuuccuuggguuuguucugga

SEQ ID NO: 4620 - RNA, 22 nt, Artificial Sequence
  Synthesized RNAi sequence
auuucuuagugacaguuuggcc

SEQ ID NO: 4621 - RNA, 22 nt, Artificial Sequence
  Synthesized RNAi sequence
auuucuugaacuguugcgacua

SEQ ID NO: 4622 - RNA, 22 nt, Artificial Sequence
  Synthesized RNAi sequence
auuugauggcaccuguguaggu

SEQ ID NO: 4623 - RNA, 22 nt, Artificial Sequence
  Synthesized RNAi sequence
auuuggucaucuggacugcuau

SEQ ID NO: 4624 - RNA, 22 nt, Artificial Sequence
  Synthesized RNAi sequence
auuuugcucucaagcugguuca

SEQ ID NO: 4625 - RNA, 22 nt, Artificial Sequence
  Synthesized RNAi sequence
uaaaccuuggggccgacguugu

SEQ ID NO: 4626 - RNA, 22 nt, Artificial Sequence
  Synthesized RNAi sequence
uaaucaguuccuugucugauua

SEQ ID NO: 4627 - RNA, 22 nt, Artificial Sequence
  Synthesized RNAi sequence
uaccagacauuuugcucucaag

SEQ ID NO: 4628 - RNA, 22 nt, Artificial Sequence
  Synthesized RNAi sequence
uaccaucuuggacugagaucuu

SEQ ID NO: 4629 - RNA, 22 nt, Artificial Sequence
  Synthesized RNAi sequence
uacgugaugaggaacgagaaga

SEQ ID NO: 4630 - RNA, 22 nt, Artificial Sequence
  Synthesized RNAi sequence
uacugccaguugaaucugaggg

SEQ ID NO: 4631 - RNA, 22 nt, Artificial Sequence
  Synthesized RNAi sequence
uacugcugccuggaguugaauu

SEQ ID NO: 4632 - RNA, 22 nt, Artificial Sequence
  Synthesized RNAi sequence
uagaaauaccaucuuggacuga

SEQ ID NO: 4633 - RNA, 22 nt, Artificial Sequence
  Synthesized RNAi sequence
uagaagccucagcagcagauuu

SEQ ID NO: 4634 - RNA, 22 nt, Artificial Sequence
  Synthesized RNAi sequence
uagaagccuuuuggcaauguug

SEQ ID NO: 4635 - RNA, 22 nt, Artificial Sequence
  Synthesized RNAi sequence
uagcaccauagggaaguccagc

SEQ ID NO: 4636 - RNA, 22 nt, Artificial Sequence
  Synthesized RNAi sequence
uagcaggagaaguuccccuacu

SEQ ID NO: 4637 - RNA, 22 nt, Artificial Sequence
  Synthesized RNAi sequence
uagccaauuuggucaucuggac

SEQ ID NO: 4638 - RNA, 22 nt, Artificial Sequence
  Synthesized RNAi sequence
uagcccaucugccuuguguggu

SEQ ID NO: 4639 - RNA, 22 nt, Artificial Sequence
  Synthesized RNAi sequence
uaggccugaguugagucagcac

SEQ ID NO: 4640 - RNA, 22 nt, Artificial Sequence
  Synthesized RNAi sequence
uagggaaguccagcuucuggcc

SEQ ID NO: 4641 - RNA, 22 nt, Artificial Sequence
  Synthesized RNAi sequence
uagguaguagaaauaccaucuu

SEQ ID NO: 4642 - RNA, 22 nt, Artificial Sequence
  Synthesized RNAi sequence
uaggucaaccacguucccgaag

SEQ ID NO: 4643 - RNA, 22 nt, Artificial Sequence
  Synthesized RNAi sequence
uaguagaaauaccaucuuggac

SEQ ID NO: 4644 - RNA, 22 nt, Artificial Sequence
  Synthesized RNAi sequence
uaguagccaauuuggucaucug

SEQ ID NO: 4645 - RNA, 22 nt, Artificial Sequence
  Synthesized RNAi sequence
uagugacaguuuggccuuguug

SEQ ID NO: 4646 - RNA, 22 nt, Artificial Sequence
  Synthesized RNAi sequence
uaguuccugguccccaaaauuu

SEQ ID NO: 4647 - RNA, 22 nt, Artificial Sequence
  Synthesized RNAi sequence
uauagcccaucugccuugugug

SEQ ID NO: 4648 - RNA, 22 nt, Artificial Sequence
  Synthesized RNAi sequence
uaugaugccgucuuuguuagca

SEQ ID NO: 4649 - RNA, 22 nt, Artificial Sequence
  Synthesized RNAi sequence
uaugcgucaauaugcuuauuca

SEQ ID NO: 4650 - RNA, 22 nt, Artificial Sequence
  Synthesized RNAi sequence
uaugcuuauucagcaaaaugac

SEQ ID NO: 4651 - RNA, 22 nt, Artificial Sequence
  Synthesized RNAi sequence
uauuauuggguaaaccuugggg

SEQ ID NO: 4652 - RNA, 22 nt, Artificial Sequence
  Synthesized RNAi sequence
uauucaaggcucccucaguugc

SEQ ID NO: 4653 - RNA, 22 nt, Artificial Sequence
  Synthesized RNAi sequence
uauucagcaaaaugacuugauc

SEQ ID NO: 4654 - RNA, 22 nt, Artificial Sequence
  Synthesized RNAi sequence
uauuggguaaaccuuggggccg

SEQ ID NO: 4655 - RNA, 22 nt, Artificial Sequence
  Synthesized RNAi sequence
ucaaccacguucccgaaggugu

SEQ ID NO: 4656 - RNA, 22 nt, Artificial Sequence
  Synthesized RNAi sequence
ucaagcagcagcaaagcaagag

SEQ ID NO: 4657 - RNA, 22 nt, Artificial Sequence
  Synthesized RNAi sequence
ucaagcugguucaaucugucaa

SEQ ID NO: 4658 - RNA, 22 nt, Artificial Sequence
  Synthesized RNAi sequence
ucaaggcucccucaguugcaac

SEQ ID NO: 4659 - RNA, 22 nt, Artificial Sequence
  Synthesized RNAi sequence
ucaauaugcuuauucagcaaaa

SEQ ID NO: 4660 - RNA, 22 nt, Artificial Sequence
  Synthesized RNAi sequence
ucaaucugucaagcagcagcaa

SEQ ID NO: 4661 - RNA, 22 nt, Artificial Sequence
  Synthesized RNAi sequence
ucaccgccauugccagccauuc

SEQ ID NO: 4662 - RNA, 22 nt, Artificial Sequence
  Synthesized RNAi sequence
ucagcaaaaugacuugaucuuu

SEQ ID NO: 4663 - RNA, 22 nt, Artificial Sequence
  Synthesized RNAi sequence
ucaguugcaacccauaugaugc

SEQ ID NO: 4664 - RNA, 22 nt, Artificial Sequence
  Synthesized RNAi sequence
ucauccaauuugauggcaccug

SEQ ID NO: 4665 - RNA, 22 nt, Artificial Sequence
  Synthesized RNAi sequence
ucaucuggacugcuauuggugu

SEQ ID NO: 4666 - RNA, 22 nt, Artificial Sequence
  Synthesized RNAi sequence
uccaauuugauggcaccugugu

SEQ ID NO: 4667 - RNA, 22 nt, Artificial Sequence
  Synthesized RNAi sequence
uccaugccaaugcgcgacauuc

SEQ ID NO: 4668 - RNA, 22 nt, Artificial Sequence
  Synthesized RNAi sequence
uccauucugguuacugccaguu

SEQ ID NO: 4669 - RNA, 22 nt, Artificial Sequence
  Synthesized RNAi sequence
uccccaaaauuuccuuggguuu

SEQ ID NO: 4670 - RNA, 22 nt, Artificial Sequence
  Synthesized RNAi sequence
uccccuacugcugccuggaguu

SEQ ID NO: 4671 - RNA, 22 nt, Artificial Sequence
  Synthesized RNAi sequence
ucccgaaggugugacuuccaug

SEQ ID NO: 4672 - RNA, 22 nt, Artificial Sequence
  Synthesized RNAi sequence
ucccucaguugcaacccauaug

SEQ ID NO: 4673 - RNA, 22 nt, Artificial Sequence
  Synthesized RNAi sequence
ucccuucugcguagaagccuuu

SEQ ID NO: 4674 - RNA, 22 nt, Artificial Sequence
  Synthesized RNAi sequence
uccuagguaguagaaauaccau

SEQ ID NO: 4675 - RNA, 22 nt, Artificial Sequence
  Synthesized RNAi sequence
uccugguccccaaaauuuccuu

SEQ ID NO: 4676 - RNA, 22 nt, Artificial Sequence
  Synthesized RNAi sequence
uccuugaggaaguuguagcacg

SEQ ID NO: 4677 - RNA, 22 nt, Artificial Sequence
  Synthesized RNAi sequence
uccuugccauguugagugagag

SEQ ID NO: 4678 - RNA, 22 nt, Artificial Sequence
  Synthesized RNAi sequence
uccuuggguuuguucuggacca

SEQ ID NO: 4679 - RNA, 22 nt, Artificial Sequence
  Synthesized RNAi sequence
uccuugucugauuaguuccugg

SEQ ID NO: 4680 - RNA, 22 nt, Artificial Sequence
  Synthesized RNAi sequence
ucgguaguagccaauuugguca

SEQ ID NO: 4681 - RNA, 22 nt, Artificial Sequence
  Synthesized RNAi sequence
ucuagcaggagaaguuccccua

SEQ ID NO: 4682 - RNA, 22 nt, Artificial Sequence
  Synthesized RNAi sequence
ucucaagcugguucaaucuguc

SEQ ID NO: 4683 - RNA, 22 nt, Artificial Sequence
  Synthesized RNAi sequence
ucuccauucugguuacugccag

SEQ ID NO: 4684 - RNA, 22 nt, Artificial Sequence
  Synthesized RNAi sequence
ucucugcgguaaggcuugaguu

SEQ ID NO: 4685 - RNA, 22 nt, Artificial Sequence
  Synthesized RNAi sequence
ucugaggguccaccaaacguaa

SEQ ID NO: 4686 - RNA, 22 nt, Artificial Sequence
  Synthesized RNAi sequence
ucugauuaguuccuggucccca

SEQ ID NO: 4687 - RNA, 22 nt, Artificial Sequence
  Synthesized RNAi sequence
ucugcaugaguuuaggccugag

SEQ ID NO: 4688 - RNA, 22 nt, Artificial Sequence
  Synthesized RNAi sequence
ucugccgaaagcuuguguuaca

SEQ ID NO: 4689 - RNA, 22 nt, Artificial Sequence
  Synthesized RNAi sequence
ucugccuuguguggucugcaug

SEQ ID NO: 4690 - RNA, 22 nt, Artificial Sequence
  Synthesized RNAi sequence
ucugcgguaaggcuugaguuuc

SEQ ID NO: 4691 - RNA, 22 nt, Artificial Sequence
  Synthesized RNAi sequence
ucugcguagaagccuuuuggca

SEQ ID NO: 4692 - RNA, 22 nt, Artificial Sequence
  Synthesized RNAi sequence
ucugcucccuucugcguagaag

SEQ ID NO: 4693 - RNA, 22 nt, Artificial Sequence
  Synthesized RNAi sequence
ucuggaccacgucugccgaaag

SEQ ID NO: 4694 - RNA, 22 nt, Artificial Sequence
  Synthesized RNAi sequence
ucuggacugcuauugguguuaa

SEQ ID NO: 4695 - RNA, 22 nt, Artificial Sequence
  Synthesized RNAi sequence
ucuggcccaguuccuagguagu

SEQ ID NO: 4696 - RNA, 22 nt, Artificial Sequence
  Synthesized RNAi sequence
ucugucaagcagcagcaaagca

SEQ ID NO: 4697 - RNA, 22 nt, Artificial Sequence
  Synthesized RNAi sequence
ucugucucugcgguaaggcuug

SEQ ID NO: 4698 - RNA, 22 nt, Artificial Sequence
  Synthesized RNAi sequence
ucuuagugacaguuuggccuug

SEQ ID NO: 4699 - RNA, 22 nt, Artificial Sequence
  Synthesized RNAi sequence
ucuuccuugccauguugaguga

SEQ ID NO: 4700 - RNA, 22 nt, Artificial Sequence
  Synthesized RNAi sequence
ucuucgguaguagccaauuugg

SEQ ID NO: 4701 - RNA, 22 nt, Artificial Sequence
  Synthesized RNAi sequence
ucuucugucucugcgguaaggc

SEQ ID NO: 4702 - RNA, 22 nt, Artificial Sequence
  Synthesized RNAi sequence
ucuugaacuguugcgacuacgu

SEQ ID NO: 4703 - RNA, 22 nt, Artificial Sequence
  Synthesized RNAi sequence
ucuuggacugagaucuuucauu

SEQ ID NO: 4704 - RNA, 22 nt, Artificial Sequence
  Synthesized RNAi sequence
ucuuuguuagcaccauagggaa

SEQ ID NO: 4705 - RNA, 22 nt, Artificial Sequence
  Synthesized RNAi sequence
ugaaccaagacgcaguauuauu

SEQ ID NO: 4706 - RNA, 22 nt, Artificial Sequence
  Synthesized RNAi sequence
ugaacuguugcgacuacgugau

SEQ ID NO: 4707 - RNA, 22 nt, Artificial Sequence
  Synthesized RNAi sequence
ugaaucugaggguccaccaaac

SEQ ID NO: 4708 - RNA, 22 nt, Artificial Sequence
  Synthesized RNAi sequence
ugacaguuuggccuuguuguug

SEQ ID NO: 4709 - RNA, 22 nt, Artificial Sequence
  Synthesized RNAi sequence
ugacuuccaugccaaugcgcga

SEQ ID NO: 4710 - RNA, 22 nt, Artificial Sequence
  Synthesized RNAi sequence
ugacuugaucuuugaaauuugg

SEQ ID NO: 4711 - RNA, 22 nt, Artificial Sequence
  Synthesized RNAi sequence
ugagagcggugaaccaagacgc

SEQ ID NO: 4712 - RNA, 22 nt, Artificial Sequence
  Synthesized RNAi sequence
ugaggaacgagaagaggcuuga

SEQ ID NO: 4713 - RNA, 22 nt, Artificial Sequence
  Synthesized RNAi sequence
ugaggaaguuguagcacgauug

SEQ ID NO: 4714 - RNA, 22 nt, Artificial Sequence
  Synthesized RNAi sequence
ugaggguccaccaaacguaaug

SEQ ID NO: 4715 - RNA, 22 nt, Artificial Sequence
  Synthesized RNAi sequence
ugagugagagcggugaaccaag

SEQ ID NO: 4716 - RNA, 22 nt, Artificial Sequence
  Synthesized RNAi sequence
ugaguugagucagcacugcuca

SEQ ID NO: 4717 - RNA, 22 nt, Artificial Sequence
  Synthesized RNAi sequence
ugaguuuaggccugaguugagu

SEQ ID NO: 4718 - RNA, 22 nt, Artificial Sequence
  Synthesized RNAi sequence
ugaucuuugaaauuuggaucuu

SEQ ID NO: 4719 - RNA, 22 nt, Artificial Sequence
  Synthesized RNAi sequence
ugaugccgucuuuguuagcacc

SEQ ID NO: 4720 - RNA, 22 nt, Artificial Sequence
  Synthesized RNAi sequence
ugauggcaccuguguaggucaa

SEQ ID NO: 4721 - RNA, 22 nt, Artificial Sequence
  Synthesized RNAi sequence
ugauuaguuccugguccccaaa

SEQ ID NO: 4722 - RNA, 22 nt, Artificial Sequence
  Synthesized RNAi sequence
ugcaacccauaugaugccgucu

SEQ ID NO: 4723 - RNA, 22 nt, Artificial Sequence
  Synthesized RNAi sequence
ugcagcaggaagaagagucaca

SEQ ID NO: 4724 - RNA, 22 nt, Artificial Sequence
  Synthesized RNAi sequence
ugcagcauuguuagcaggauug

SEQ ID NO: 4725 - RNA, 22 nt, Artificial Sequence
  Synthesized RNAi sequence
ugcaugaguuuaggccugaguu

SEQ ID NO: 4726 - RNA, 22 nt, Artificial Sequence
  Synthesized RNAi sequence
ugccaaugcgcgacauuccgaa

SEQ ID NO: 4727 - RNA, 22 nt, Artificial Sequence
  Synthesized RNAi sequence
ugccaaugugaucuuuuggugu

SEQ ID NO: 4728 - RNA, 22 nt, Artificial Sequence
  Synthesized RNAi sequence
ugccagccauucuagcaggaga

SEQ ID NO: 4729 - RNA, 22 nt, Artificial Sequence
  Synthesized RNAi sequence
ugccaguugaaucugagggucc

SEQ ID NO: 4730 - RNA, 22 nt, Artificial Sequence
  Synthesized RNAi sequence
ugccauguugagugagagcggu

SEQ ID NO: 4731 - RNA, 22 nt, Artificial Sequence
  Synthesized RNAi sequence
ugccgaaagcuuguguuacauu

SEQ ID NO: 4732 - RNA, 22 nt, Artificial Sequence
  Synthesized RNAi sequence
ugccgucuuuguuagcaccaua

SEQ ID NO: 4733 - RNA, 22 nt, Artificial Sequence
  Synthesized RNAi sequence
ugccuggaguugaauuucuuga

SEQ ID NO: 4734 - RNA, 22 nt, Artificial Sequence
  Synthesized RNAi sequence
ugccuuguguggucugcaugag

SEQ ID NO: 4735 - RNA, 22 nt, Artificial Sequence
  Synthesized RNAi sequence
ugcgacuacgugaugaggaacg

SEQ ID NO: 4736 - RNA, 22 nt, Artificial Sequence
  Synthesized RNAi sequence
ugcggccaauguuuguaaucag

SEQ ID NO: 4737 - RNA, 22 nt, Artificial Sequence
  Synthesized RNAi sequence
ugcggggugcauuucgcugauu

SEQ ID NO: 4738 - RNA, 22 nt, Artificial Sequence
  Synthesized RNAi sequence
ugcgggugccaaugugaucuuu

SEQ ID NO: 4739 - RNA, 22 nt, Artificial Sequence
  Synthesized RNAi sequence
ugcgguaaggcuugaguuucau

SEQ ID NO: 4740 - RNA, 22 nt, Artificial Sequence
  Synthesized RNAi sequence
ugcguucuccauucugguuacu

SEQ ID NO: 4741 - RNA, 22 nt, Artificial Sequence
  Synthesized RNAi sequence
ugcucccuucugcguagaagcc

SEQ ID NO: 4742 - RNA, 22 nt, Artificial Sequence
  Synthesized RNAi sequence
ugcucucaagcugguucaaucu

SEQ ID NO: 4743 - RNA, 22 nt, Artificial Sequence
  Synthesized RNAi sequence
ugcugccuggaguugaauuucu

SEQ ID NO: 4744 - RNA, 22 nt, Artificial Sequence
  Synthesized RNAi sequence
ugcuuauucagcaaaaugacuu

SEQ ID NO: 4745 - RNA, 22 nt, Artificial Sequence
  Synthesized RNAi sequence
uggaccacgucugccgaaagcu

SEQ ID NO: 4746 - RNA, 22 nt, Artificial Sequence
  Synthesized RNAi sequence
uggacugcuauugguguuaauu

SEQ ID NO: 4747 - RNA, 22 nt, Artificial Sequence
  Synthesized RNAi sequence
uggaguugaauuucuugaacug

SEQ ID NO: 4748 - RNA, 22 nt, Artificial Sequence
  Synthesized RNAi sequence
uggaucuuugucauccaauuug

SEQ ID NO: 4749 - RNA, 22 nt, Artificial Sequence
  Synthesized RNAi sequence
uggcaauguuguuccuugagga

SEQ ID NO: 4750 - RNA, 22 nt, Artificial Sequence
  Synthesized RNAi sequence
uggcaccuguguaggucaacca

SEQ ID NO: 4751 - RNA, 22 nt, Artificial Sequence
  Synthesized RNAi sequence
uggcccaguuccuagguaguag

SEQ ID NO: 4752 - RNA, 22 nt, Artificial Sequence
  Synthesized RNAi sequence
uggccuuguuguuguuggccuu

SEQ ID NO: 4753 - RNA, 22 nt, Artificial Sequence
  Synthesized RNAi sequence
uggccuuuaccagacauuuugc

SEQ ID NO: 4754 - RNA, 22 nt, Artificial Sequence
  Synthesized RNAi sequence
ugggaauguuuuguaugcguca

SEQ ID NO: 4755 - RNA, 22 nt, Artificial Sequence
  Synthesized RNAi sequence
uggggccgacguuguuuugauc

SEQ ID NO: 4756 - RNA, 22 nt, Artificial Sequence
  Synthesized RNAi sequence
uggguuuguucuggaccacguc

SEQ ID NO: 4757 - RNA, 22 nt, Artificial Sequence
  Synthesized RNAi sequence
uggucaucuggacugcuauugg

SEQ ID NO: 4758 - RNA, 22 nt, Artificial Sequence
  Synthesized RNAi sequence
ugguccccaaaauuuccuuggg

SEQ ID NO: 4759 - RNA, 22 nt, Artificial Sequence
  Synthesized RNAi sequence
uggucugcaugaguuuaggccu

SEQ ID NO: 4760 - RNA, 22 nt, Artificial Sequence
  Synthesized RNAi sequence
ugguguauucaaggcucccuca

SEQ ID NO: 4761 - RNA, 22 nt, Artificial Sequence
  Synthesized RNAi sequence
ugguuacugccaguugaaucug

SEQ ID NO: 4762 - RNA, 22 nt, Artificial Sequence
  Synthesized RNAi sequence
ugguucaaucugucaagcagca

SEQ ID NO: 4763 - RNA, 22 nt, Artificial Sequence
  Synthesized RNAi sequence
uguaaucaguuccuugucugau

SEQ ID NO: 4764 - RNA, 22 nt, Artificial Sequence
  Synthesized RNAi sequence
uguagcacgauugcagcauugu

SEQ ID NO: 4765 - RNA, 22 nt, Artificial Sequence
  Synthesized RNAi sequence
uguaggucaaccacguucccga

SEQ ID NO: 4766 - RNA, 22 nt, Artificial Sequence
  Synthesized RNAi sequence
uguaugcgucaauaugcuuauu

SEQ ID NO: 4767 - RNA, 22 nt, Artificial Sequence
  Synthesized RNAi sequence
uguauucaaggcucccucaguu

SEQ ID NO: 4768 - RNA, 22 nt, Artificial Sequence
  Synthesized RNAi sequence
ugucaagcagcagcaaagcaag

SEQ ID NO: 4769 - RNA, 22 nt, Artificial Sequence
  Synthesized RNAi sequence
ugucauccaauuugauggcacc

SEQ ID NO: 4770 - RNA, 22 nt, Artificial Sequence
  Synthesized RNAi sequence
ugucucugcgguaaggcuugag

SEQ ID NO: 4771 - RNA, 22 nt, Artificial Sequence
  Synthesized RNAi sequence
ugucugauuaguuccugguccc

SEQ ID NO: 4772 - RNA, 22 nt, Artificial Sequence
  Synthesized RNAi sequence
ugugacuuccaugccaaugcgc

SEQ ID NO: 4773 - RNA, 22 nt, Artificial Sequence
  Synthesized RNAi sequence
ugugaucuuuugguguauucaa

SEQ ID NO: 4774 - RNA, 22 nt, Artificial Sequence
  Synthesized RNAi sequence
uguggucugcaugaguuuaggc

SEQ ID NO: 4775 - RNA, 22 nt, Artificial Sequence
  Synthesized RNAi sequence
uguguaggucaaccacguuccc

SEQ ID NO: 4776 - RNA, 22 nt, Artificial Sequence
  Synthesized RNAi sequence
uguguggucugcaugaguuuag

SEQ ID NO: 4777 - RNA, 22 nt, Artificial Sequence
  Synthesized RNAi sequence
uguguuacauuguaugcuuuag

SEQ ID NO: 4778 - RNA, 22 nt, Artificial Sequence
  Synthesized RNAi sequence
uguuagcaccauagggaagucc

SEQ ID NO: 4779 - RNA, 22 nt, Artificial Sequence
  Synthesized RNAi sequence
uguuagcaggauugcgggugcc

SEQ ID NO: 4780 - RNA, 22 nt, Artificial Sequence
  Synthesized RNAi sequence
uguuccuugaggaaguuguagc

SEQ ID NO: 4781 - RNA, 22 nt, Artificial Sequence
  Synthesized RNAi sequence
uguucuggaccacgucugccga

SEQ ID NO: 4782 - RNA, 22 nt, Artificial Sequence
  Synthesized RNAi sequence
uguugagugagagcggugaacc

SEQ ID NO: 4783 - RNA, 22 nt, Artificial Sequence
  Synthesized RNAi sequence
uguugcgacuacgugaugagga

SEQ ID NO: 4784 - RNA, 22 nt, Artificial Sequence
  Synthesized RNAi sequence
uguuggccuuuaccagacauuu

SEQ ID NO: 4785 - RNA, 22 nt, Artificial Sequence
  Synthesized RNAi sequence
uguuguuccuugaggaaguugu

SEQ ID NO: 4786 - RNA, 22 nt, Artificial Sequence
  Synthesized RNAi sequence
uguuguuggccuuuaccagaca

SEQ ID NO: 4787 - RNA, 22 nt, Artificial Sequence
  Synthesized RNAi sequence
uguuguuguuggccuuuaccag

SEQ ID NO: 4788 - RNA, 22 nt, Artificial Sequence
  Synthesized RNAi sequence
uguuucuucugucucugcggua

SEQ ID NO: 4789 - RNA, 22 nt, Artificial Sequence
  Synthesized RNAi sequence
uguuuguaaucaguuccuuguc

SEQ ID NO: 4790 - RNA, 22 nt, Artificial Sequence
  Synthesized RNAi sequence
uguuuugaucgcgccccacugc

SEQ ID NO: 4791 - RNA, 22 nt, Artificial Sequence
  Synthesized RNAi sequence
uguuuuguaugcgucaauaugc

SEQ ID NO: 4792 - RNA, 22 nt, Artificial Sequence
  Synthesized RNAi sequence
uuacugccaguugaaucugagg

SEQ ID NO: 4793 - RNA, 22 nt, Artificial Sequence
  Synthesized RNAi sequence
uuagaagccucagcagcagauu

SEQ ID NO: 4794 - RNA, 22 nt, Artificial Sequence
  Synthesized RNAi sequence
uuagcaccauagggaaguccag

SEQ ID NO: 4795 - RNA, 22 nt, Artificial Sequence
  Synthesized RNAi sequence
uuagcaggauugcgggugccaa

SEQ ID NO: 4796 - RNA, 22 nt, Artificial Sequence
  Synthesized RNAi sequence
uuaggccugaguugagucagca

SEQ ID NO: 4797 - RNA, 22 nt, Artificial Sequence
  Synthesized RNAi sequence
uuagugacaguuuggccuuguu

SEQ ID NO: 4798 - RNA, 22 nt, Artificial Sequence
  Synthesized RNAi sequence
uuaguuccugguccccaaaauu

SEQ ID NO: 4799 - RNA, 22 nt, Artificial Sequence
  Synthesized RNAi sequence
uuauucagcaaaaugacuugau

SEQ ID NO: 4800 - RNA, 22 nt, Artificial Sequence
  Synthesized RNAi sequence
uuauuggguaaaccuuggggcc

SEQ ID NO: 4801 - RNA, 22 nt, Artificial Sequence
  Synthesized RNAi sequence
uucaaggcucccucaguugcaa

SEQ ID NO: 4802 - RNA, 22 nt, Artificial Sequence
  Synthesized RNAi sequence
uucaaucugucaagcagcagca

SEQ ID NO: 4803 - RNA, 22 nt, Artificial Sequence
  Synthesized RNAi sequence
uucagcaaaaugacuugaucuu

SEQ ID NO: 4804 - RNA, 22 nt, Artificial Sequence
  Synthesized RNAi sequence
uuccaugccaaugcgcgacauu

SEQ ID NO: 4805 - RNA, 22 nt, Artificial Sequence
  Synthesized RNAi sequence
uucccgaaggugugacuuccau

SEQ ID NO: 4806 - RNA, 22 nt, Artificial Sequence
  Synthesized RNAi sequence
uuccuagguaguagaaauacca

SEQ ID NO: 4807 - RNA, 22 nt, Artificial Sequence
  Synthesized RNAi sequence
uuccugguccccaaaauuuccu

SEQ ID NO: 4808 - RNA, 22 nt, Artificial Sequence
  Synthesized RNAi sequence
uuccuugaggaaguuguagcac

SEQ ID NO: 4809 - RNA, 22 nt, Artificial Sequence
  Synthesized RNAi sequence
uuccuuggguuuguucuggacc

SEQ ID NO: 4810 - RNA, 22 nt, Artificial Sequence
  Synthesized RNAi sequence
uuccuugucugauuaguuccug

SEQ ID NO: 4811 - RNA, 22 nt, Artificial Sequence
  Synthesized RNAi sequence
uucgguaguagccaauuugguc

SEQ ID NO: 4812 - RNA, 22 nt, Artificial Sequence
  Synthesized RNAi sequence
uucuagcaggagaaguuccccu

SEQ ID NO: 4813 - RNA, 22 nt, Artificial Sequence
  Synthesized RNAi sequence
uucuccauucugguuacugcca

SEQ ID NO: 4814 - RNA, 22 nt, Artificial Sequence
  Synthesized RNAi sequence
uucugcguagaagccuuuuggc

SEQ ID NO: 4815 - RNA, 22 nt, Artificial Sequence
  Synthesized RNAi sequence
uucuggaccacgucugccgaaa

SEQ ID NO: 4816 - RNA, 22 nt, Artificial Sequence
  Synthesized RNAi sequence
uucuggcccaguuccuagguag

SEQ ID NO: 4817 - RNA, 22 nt, Artificial Sequence
  Synthesized RNAi sequence
uucugguuacugccaguugaau

SEQ ID NO: 4818 - RNA, 22 nt, Artificial Sequence
  Synthesized RNAi sequence
uucugucucugcgguaaggcuu

SEQ ID NO: 4819 - RNA, 22 nt, Artificial Sequence
  Synthesized RNAi sequence
uucuuagugacaguuuggccuu

SEQ ID NO: 4820 - RNA, 22 nt, Artificial Sequence
  Synthesized RNAi sequence
uucuucugucucugcgguaagg

SEQ ID NO: 4821 - RNA, 22 nt, Artificial Sequence
  Synthesized RNAi sequence
uucuugaacuguugcgacuacg

SEQ ID NO: 4822 - RNA, 22 nt, Artificial Sequence
  Synthesized RNAi sequence
uugaaauuuggaucuuugucau

SEQ ID NO: 4823 - RNA, 22 nt, Artificial Sequence
  Synthesized RNAi sequence
uugaacuguugcgacuacguga

SEQ ID NO: 4824 - RNA, 22 nt, Artificial Sequence
  Synthesized RNAi sequence
uugaaucugaggguccaccaaa

SEQ ID NO: 4825 - RNA, 22 nt, Artificial Sequence
  Synthesized RNAi sequence
uugaauuucuugaacuguugcg

SEQ ID NO: 4826 - RNA, 22 nt, Artificial Sequence
  Synthesized RNAi sequence
uugaggaaguuguagcacgauu

SEQ ID NO: 4827 - RNA, 22 nt, Artificial Sequence
  Synthesized RNAi sequence
uugagugagagcggugaaccaa

SEQ ID NO: 4828 - RNA, 22 nt, Artificial Sequence
  Synthesized RNAi sequence
uugaucuuugaaauuuggaucu

SEQ ID NO: 4829 - RNA, 22 nt, Artificial Sequence
  Synthesized RNAi sequence
uugauggcaccuguguagguca

SEQ ID NO: 4830 - RNA, 22 nt, Artificial Sequence
  Synthesized RNAi sequence
uugcaacccauaugaugccguc

SEQ ID NO: 4831 - RNA, 22 nt, Artificial Sequence
  Synthesized RNAi sequence
uugcagcauuguuagcaggauu

SEQ ID NO: 4832 - RNA, 22 nt, Artificial Sequence
  Synthesized RNAi sequence
uugccagccauucuagcaggag

SEQ ID NO: 4833 - RNA, 22 nt, Artificial Sequence
  Synthesized RNAi sequence
uugccauguugagugagagcgg

SEQ ID NO: 4834 - RNA, 22 nt, Artificial Sequence
  Synthesized RNAi sequence
uugcgacuacgugaugaggaac

SEQ ID NO: 4835 - RNA, 22 nt, Artificial Sequence
  Synthesized RNAi sequence
uugcggccaauguuuguaauca

SEQ ID NO: 4836 - RNA, 22 nt, Artificial Sequence
  Synthesized RNAi sequence
uugcgggugccaaugugaucuu

SEQ ID NO: 4837 - RNA, 22 nt, Artificial Sequence
  Synthesized RNAi sequence
uugcucucaagcugguucaauc

SEQ ID NO: 4838 - RNA, 22 nt, Artificial Sequence
  Synthesized RNAi sequence
uuggcaauguuguuccuugagg

SEQ ID NO: 4839 - RNA, 22 nt, Artificial Sequence
  Synthesized RNAi sequence
uuggccuuguuguuguuggccu

SEQ ID NO: 4840 - RNA, 22 nt, Artificial Sequence
  Synthesized RNAi sequence
uuggggccgacguuguuuugau

SEQ ID NO: 4841 - RNA, 22 nt, Artificial Sequence
  Synthesized RNAi sequence
uuggguaaaccuuggggccgac

SEQ ID NO: 4842 - RNA, 22 nt, Artificial Sequence
  Synthesized RNAi sequence
uuggguuuguucuggaccacgu

SEQ ID NO: 4843 - RNA, 22 nt, Artificial Sequence
  Synthesized RNAi sequence
uuggucaucuggacugcuauug

SEQ ID NO: 4844 - RNA, 22 nt, Artificial Sequence
  Synthesized RNAi sequence
uugguguauucaaggcucccuc

SEQ ID NO: 4845 - RNA, 22 nt, Artificial Sequence
  Synthesized RNAi sequence
uuguaaucaguuccuugucuga

SEQ ID NO: 4846 - RNA, 22 nt, Artificial Sequence
  Synthesized RNAi sequence
uuguagcacgauugcagcauug

SEQ ID NO: 4847 - RNA, 22 nt, Artificial Sequence
  Synthesized RNAi sequence
uuguaugcgucaauaugcuuau

SEQ ID NO: 4848 - RNA, 22 nt, Artificial Sequence
  Synthesized RNAi sequence
uugucauccaauuugauggcac

SEQ ID NO: 4849 - RNA, 22 nt, Artificial Sequence
  Synthesized RNAi sequence
uugucugauuaguuccuggucc

SEQ ID NO: 4850 - RNA, 22 nt, Artificial Sequence
  Synthesized RNAi sequence
uuguguggucugcaugaguuua

SEQ ID NO: 4851 - RNA, 22 nt, Artificial Sequence
  Synthesized RNAi sequence
uuguguuacauuguaugcuuua

SEQ ID NO: 4852 - RNA, 22 nt, Artificial Sequence
  Synthesized RNAi sequence
uuguuagcaccauagggaaguc

SEQ ID NO: 4853 - RNA, 22 nt, Artificial Sequence
  Synthesized RNAi sequence
uuguuagcaggauugcgggugc

SEQ ID NO: 4854 - RNA, 22 nt, Artificial Sequence
  Synthesized RNAi sequence
uuguuccuugaggaaguuguag

SEQ ID NO: 4855 - RNA, 22 nt, Artificial Sequence
  Synthesized RNAi sequence
uuguucuggaccacgucugccg

SEQ ID NO: 4856 - RNA, 22 nt, Artificial Sequence
  Synthesized RNAi sequence
uuguuggccuuuaccagacauu

SEQ ID NO: 4857 - RNA, 22 nt, Artificial Sequence
  Synthesized RNAi sequence
uuguuguuggccuuuaccagac

SEQ ID NO: 4858 - RNA, 22 nt, Artificial Sequence
  Synthesized RNAi sequence
uuguuguuguuggccuuuacca

SEQ ID NO: 4859 - RNA, 22 nt, Artificial Sequence
  Synthesized RNAi sequence
uuguuuugaucgcgccccacug

SEQ ID NO: 4860 - RNA, 22 nt, Artificial Sequence
  Synthesized RNAi sequence
uuuaccagacauuuugcucuca

SEQ ID NO: 4861 - RNA, 22 nt, Artificial Sequence
  Synthesized RNAi sequence
uuuaggccugaguugagucagc

SEQ ID NO: 4862 - RNA, 22 nt, Artificial Sequence
  Synthesized RNAi sequence
uuuccuuggguuuguucuggac

SEQ ID NO: 4863 - RNA, 22 nt, Artificial Sequence
  Synthesized RNAi sequence
uuucuuagugacaguuuggccu

SEQ ID NO: 4864 - RNA, 22 nt, Artificial Sequence
  Synthesized RNAi sequence
uuucuucugucucugcgguaag

SEQ ID NO: 4865 - RNA, 22 nt, Artificial Sequence
  Synthesized RNAi sequence
uuucuugaacuguugcgacuac

SEQ ID NO: 4866 - RNA, 22 nt, Artificial Sequence
  Synthesized RNAi sequence
uuugauggcaccuguguagguc

SEQ ID NO: 4867 - RNA, 22 nt, Artificial Sequence
  Synthesized RNAi sequence
uuugcggccaauguuuguaauc

SEQ ID NO: 4868 - RNA, 22 nt, Artificial Sequence
  Synthesized RNAi sequence
uuuggcaauguuguuccuugag

SEQ ID NO: 4869 - RNA, 22 nt, Artificial Sequence
  Synthesized RNAi sequence
uuuggccuuguuguuguuggcc

SEQ ID NO: 4870 - RNA, 22 nt, Artificial Sequence
  Synthesized RNAi sequence
uuuggucaucuggacugcuauu

SEQ ID NO: 4871 - RNA, 22 nt, Artificial Sequence
  Synthesized RNAi sequence
uuugguguauucaaggcucccu

SEQ ID NO: 4872 - RNA, 22 nt, Artificial Sequence
  Synthesized RNAi sequence
uuuguaaucaguuccuugucug

SEQ ID NO: 4873 - RNA, 22 nt, Artificial Sequence
  Synthesized RNAi sequence
uuuguaugcgucaauaugcuua

SEQ ID NO: 4874 - RNA, 22 nt, Artificial Sequence
  Synthesized RNAi sequence
uuugucauccaauuugauggca

SEQ ID NO: 4875 - RNA, 22 nt, Artificial Sequence
  Synthesized RNAi sequence
uuuguuagcaccauagggaagu

SEQ ID NO: 4876 - RNA, 22 nt, Artificial Sequence
  Synthesized RNAi sequence
uuuguucuggaccacgucugcc

SEQ ID NO: 4877 - RNA, 22 nt, Artificial Sequence
  Synthesized RNAi sequence
uuuugaucgcgccccacugcgu

SEQ ID NO: 4878 - RNA, 22 nt, Artificial Sequence
  Synthesized RNAi sequence
uuuugcucucaagcugguucaa

SEQ ID NO: 4879 - RNA, 22 nt, Artificial Sequence
  Synthesized RNAi sequence
uuuugguguauucaaggcuccc

SEQ ID NO: 4880 - RNA, 22 nt, Artificial Sequence
  Synthesized RNAi sequence
uuuuguaugcgucaauaugcuu

SEQ ID NO: 4881 - RNA, 22 nt, Artificial Sequence
  Synthesized RNAi sequence
aaagcacagaaagauaauacag

SEQ ID NO: 4882 - RNA, 22 nt, Artificial Sequence
  Synthesized RNAi sequence
aaaggauucuugauccauauug

SEQ ID NO: 4883 - RNA, 22 nt, Artificial Sequence
  Synthesized RNAi sequence
aaauccuuuaggauuuggauga

SEQ ID NO: 4884 - RNA, 22 nt, Artificial Sequence
  Synthesized RNAi sequence
aacacgaugcaccaccaaagga

SEQ ID NO: 4885 - RNA, 22 nt, Artificial Sequence
  Synthesized RNAi sequence
aaccuuuccacauaccgcagac

SEQ ID NO: 4886 - RNA, 22 nt, Artificial Sequence
  Synthesized RNAi sequence
aacggcaguacagacaacacga

SEQ ID NO: 4887 - RNA, 22 nt, Artificial Sequence
  Synthesized RNAi sequence
aacuacagccauaaccuuucca

SEQ ID NO: 4888 - RNA, 22 nt, Artificial Sequence
  Synthesized RNAi sequence
aacuguuauugccugaccagua

SEQ ID NO: 4889 - RNA, 22 nt, Artificial Sequence
  Synthesized RNAi sequence
aagauaauacaguugaauuggc

SEQ ID NO: 4890 - RNA, 22 nt, Artificial Sequence
  Synthesized RNAi sequence
aagcacagaaagauaauacagu

SEQ ID NO: 4891 - RNA, 22 nt, Artificial Sequence
  Synthesized RNAi sequence
aagcauggguucgcggaguuga

SEQ ID NO: 4892 - RNA, 22 nt, Artificial Sequence
  Synthesized RNAi sequence
aagcuuuagcagcaucuacagc

SEQ ID NO: 4893 - RNA, 22 nt, Artificial Sequence
  Synthesized RNAi sequence
aaggauucuugauccauauugg

SEQ ID NO: 4894 - RNA, 22 nt, Artificial Sequence
  Synthesized RNAi sequence
aagucacaaaauccuuuaggau

SEQ ID NO: 4895 - RNA, 22 nt, Artificial Sequence
  Synthesized RNAi sequence
aaguuguagguauuuguacaua

SEQ ID NO: 4896 - RNA, 22 nt, Artificial Sequence
  Synthesized RNAi sequence
aauacaguugaauuggcaggca

SEQ ID NO: 4897 - RNA, 22 nt, Artificial Sequence
  Synthesized RNAi sequence
aauccuuuaggauuuggaugau

SEQ ID NO: 4898 - RNA, 22 nt, Artificial Sequence
  Synthesized RNAi sequence
acaaaauccuuuaggauuugga

SEQ ID NO: 4899 - RNA, 22 nt, Artificial Sequence
  Synthesized RNAi sequence
acaacacgaugcaccaccaaag

SEQ ID NO: 4900 - RNA, 22 nt, Artificial Sequence
  Synthesized RNAi sequence
acaacaucuuaacacaauuagu

SEQ ID NO: 4901 - RNA, 22 nt, Artificial Sequence
  Synthesized RNAi sequence
acaacuacagccauaaccuuuc

SEQ ID NO: 4902 - RNA, 22 nt, Artificial Sequence
  Synthesized RNAi sequence
acaaguuguagguauuuguaca

SEQ ID NO: 4903 - RNA, 22 nt, Artificial Sequence
  Synthesized RNAi sequence
acacgaugcaccaccaaaggau

SEQ ID NO: 4904 - RNA, 22 nt, Artificial Sequence
  Synthesized RNAi sequence
acagaaagauaauacaguugaa

SEQ ID NO: 4905 - RNA, 22 nt, Artificial Sequence
  Synthesized RNAi sequence
acagcaaaagcacagaaagaua

SEQ ID NO: 4906 - RNA, 22 nt, Artificial Sequence
  Synthesized RNAi sequence
acagccauaaccuuuccacaua

SEQ ID NO: 4907 - RNA, 22 nt, Artificial Sequence
  Synthesized RNAi sequence
acagggucauuagcacaaguug

SEQ ID NO: 4908 - RNA, 22 nt, Artificial Sequence
  Synthesized RNAi sequence
acaguugaauuggcaggcacuu

SEQ ID NO: 4909 - RNA, 22 nt, Artificial Sequence
  Synthesized RNAi sequence
acauacuuaccuuuuaagucac

SEQ ID NO: 4910 - RNA, 22 nt, Artificial Sequence
  Synthesized RNAi sequence
accaaaggauucuugauccaua

SEQ ID NO: 4911 - RNA, 22 nt, Artificial Sequence
  Synthesized RNAi sequence
accaccaaaggauucuugaucc

SEQ ID NO: 4912 - RNA, 22 nt, Artificial Sequence
  Synthesized RNAi sequence
accaguaccaguguguguacac

SEQ ID NO: 4913 - RNA, 22 nt, Artificial Sequence
  Synthesized RNAi sequence
accaguguguguacacaacauc

SEQ ID NO: 4914 - RNA, 22 nt, Artificial Sequence
  Synthesized RNAi sequence
accuuuccacauaccgcagacg

SEQ ID NO: 4915 - RNA, 22 nt, Artificial Sequence
  Synthesized RNAi sequence
accuuuuaagucacaaaauccu

SEQ ID NO: 4916 - RNA, 22 nt, Artificial Sequence
  Synthesized RNAi sequence
acgaugcaccaccaaaggauuc

SEQ ID NO: 4917 - RNA, 22 nt, Artificial Sequence
  Synthesized RNAi sequence
acggcaguacagacaacacgau

SEQ ID NO: 4918 - RNA, 22 nt, Artificial Sequence
  Synthesized RNAi sequence
acuacagccauaaccuuuccac

SEQ ID NO: 4919 - RNA, 22 nt, Artificial Sequence
  Synthesized RNAi sequence
acugaagcauggguucgcggag

SEQ ID NO: 4920 - RNA, 22 nt, Artificial Sequence
  Synthesized RNAi sequence
acuguuauugccugaccaguac

SEQ ID NO: 4921 - RNA, 22 nt, Artificial Sequence
  Synthesized RNAi sequence
acuuaccuuuuaagucacaaaa

SEQ ID NO: 4922 - RNA, 22 nt, Artificial Sequence
  Synthesized RNAi sequence
agaaagauaauacaguugaauu

SEQ ID NO: 4923 - RNA, 22 nt, Artificial Sequence
  Synthesized RNAi sequence
agacaacacgaugcaccaccaa

SEQ ID NO: 4924 - RNA, 22 nt, Artificial Sequence
  Synthesized RNAi sequence
agauaauacaguugaauuggca

SEQ ID NO: 4925 - RNA, 22 nt, Artificial Sequence
  Synthesized RNAi sequence
agcaaaagcacagaaagauaau

SEQ ID NO: 4926 - RNA, 22 nt, Artificial Sequence
  Synthesized RNAi sequence
agcacaaguuguagguauuugu

SEQ ID NO: 4927 - RNA, 22 nt, Artificial Sequence
  Synthesized RNAi sequence
agcacagaaagauaauacaguu

SEQ ID NO: 4928 - RNA, 22 nt, Artificial Sequence
  Synthesized RNAi sequence
agcagcaucuacagcaaaagca

SEQ ID NO: 4929 - RNA, 22 nt, Artificial Sequence
  Synthesized RNAi sequence
agcaucuacagcaaaagcacag

SEQ ID NO: 4930 - RNA, 22 nt, Artificial Sequence
  Synthesized RNAi sequence
agccauaaccuuuccacauacc

SEQ ID NO: 4931 - RNA, 22 nt, Artificial Sequence
  Synthesized RNAi sequence
agcugacugaagcauggguucg

SEQ ID NO: 4932 - RNA, 22 nt, Artificial Sequence
  Synthesized RNAi sequence
agcuuuagcagcaucuacagca

SEQ ID NO: 4933 - RNA, 22 nt, Artificial Sequence
  Synthesized RNAi sequence
aggauucuugauccauauuggc

SEQ ID NO: 4934 - RNA, 22 nt, Artificial Sequence
  Synthesized RNAi sequence
aggauuuggaugaucuaugugg

SEQ ID NO: 4935 - RNA, 22 nt, Artificial Sequence
  Synthesized RNAi sequence
agggucauuagcacaaguugua

SEQ ID NO: 4936 - RNA, 22 nt, Artificial Sequence
  Synthesized RNAi sequence
aguacagacaacacgaugcacc

SEQ ID NO: 4937 - RNA, 22 nt, Artificial Sequence
  Synthesized RNAi sequence
aguaccaguguguguacacaac

SEQ ID NO: 4938 - RNA, 22 nt, Artificial Sequence
  Synthesized RNAi sequence
agucacaaaauccuuuaggauu

SEQ ID NO: 4939 - RNA, 22 nt, Artificial Sequence
  Synthesized RNAi sequence
aguguguguacacaacaucuua

SEQ ID NO: 4940 - RNA, 22 nt, Artificial Sequence
  Synthesized RNAi sequence
aguugaauuggcaggcacuucu

SEQ ID NO: 4941 - RNA, 22 nt, Artificial Sequence
  Synthesized RNAi sequence
aguugaucacaacuacagccau

SEQ ID NO: 4942 - RNA, 22 nt, Artificial Sequence
  Synthesized RNAi sequence
auaaccuuuccacauaccgcag

SEQ ID NO: 4943 - RNA, 22 nt, Artificial Sequence
  Synthesized RNAi sequence
auaauacaguugaauuggcagg

SEQ ID NO: 4944 - RNA, 22 nt, Artificial Sequence
  Synthesized RNAi sequence
auacaguugaauuggcaggcac

SEQ ID NO: 4945 - RNA, 22 nt, Artificial Sequence
  Synthesized RNAi sequence
auacuuaccuuuuaagucacaa

SEQ ID NO: 4946 - RNA, 22 nt, Artificial Sequence
  Synthesized RNAi sequence
auauuggcuuccgguguaacug

SEQ ID NO: 4947 - RNA, 22 nt, Artificial Sequence
  Synthesized RNAi sequence
aucacaacuacagccauaaccu

SEQ ID NO: 4948 - RNA, 22 nt, Artificial Sequence
  Synthesized RNAi sequence
auccauauuggcuuccggugua

SEQ ID NO: 4949 - RNA, 22 nt, Artificial Sequence
  Synthesized RNAi sequence
auccuuuaggauuuggaugauc

SEQ ID NO: 4950 - RNA, 22 nt, Artificial Sequence
  Synthesized RNAi sequence
aucuacagcaaaagcacagaaa

SEQ ID NO: 4951 - RNA, 22 nt, Artificial Sequence
  Synthesized RNAi sequence
aucuauguggcaacggcaguac

SEQ ID NO: 4952 - RNA, 22 nt, Artificial Sequence
  Synthesized RNAi sequence
augaucuauguggcaacggcag

SEQ ID NO: 4953 - RNA, 22 nt, Artificial Sequence
  Synthesized RNAi sequence
augcaccaccaaaggauucuug

SEQ ID NO: 4954 - RNA, 22 nt, Artificial Sequence
  Synthesized RNAi sequence
auggguucgcggaguugaucac

SEQ ID NO: 4955 - RNA, 22 nt, Artificial Sequence
  Synthesized RNAi sequence
auguggcaacggcaguacagac

SEQ ID NO: 4956 - RNA, 22 nt, Artificial Sequence
  Synthesized RNAi sequence
auuagcacaaguuguagguauu

SEQ ID NO: 4957 - RNA, 22 nt, Artificial Sequence
  Synthesized RNAi sequence
auucuugauccauauuggcuuc

SEQ ID NO: 4958 - RNA, 22 nt, Artificial Sequence
  Synthesized RNAi sequence
auugccugaccaguaccagugu

SEQ ID NO: 4959 - RNA, 22 nt, Artificial Sequence
  Synthesized RNAi sequence
auuggcuuccgguguaacuguu

SEQ ID NO: 4960 - RNA, 22 nt, Artificial Sequence
  Synthesized RNAi sequence
auuuggaugaucuauguggcaa

SEQ ID NO: 4961 - RNA, 22 nt, Artificial Sequence
  Synthesized RNAi sequence
auuuguacauacuuaccuuuua

SEQ ID NO: 4962 - RNA, 22 nt, Artificial Sequence
  Synthesized RNAi sequence
uaaccuuuccacauaccgcaga

SEQ ID NO: 4963 - RNA, 22 nt, Artificial Sequence
  Synthesized RNAi sequence
uaacuguuauugccugaccagu

SEQ ID NO: 4964 - RNA, 22 nt, Artificial Sequence
  Synthesized RNAi sequence
uaagcuuuagcagcaucuacag

SEQ ID NO: 4965 - RNA, 22 nt, Artificial Sequence
  Synthesized RNAi sequence
uaauacaguugaauuggcaggc

SEQ ID NO: 4966 - RNA, 22 nt, Artificial Sequence
  Synthesized RNAi sequence
uacacaacaucuuaacacaauu

SEQ ID NO: 4967 - RNA, 22 nt, Artificial Sequence
  Synthesized RNAi sequence
uacagacaacacgaugcaccac

SEQ ID NO: 4968 - RNA, 22 nt, Artificial Sequence
  Synthesized RNAi sequence
uacagcaaaagcacagaaagau

SEQ ID NO: 4969 - RNA, 22 nt, Artificial Sequence
  Synthesized RNAi sequence
uacagccauaaccuuuccacau

SEQ ID NO: 4970 - RNA, 22 nt, Artificial Sequence
  Synthesized RNAi sequence
uacauacuuaccuuuuaaguca

SEQ ID NO: 4971 - RNA, 22 nt, Artificial Sequence
  Synthesized RNAi sequence
uaccaguguguguacacaacau

SEQ ID NO: 4972 - RNA, 22 nt, Artificial Sequence
  Synthesized RNAi sequence
uaccuuuuaagucacaaaaucc

SEQ ID NO: 4973 - RNA, 22 nt, Artificial Sequence
  Synthesized RNAi sequence
uacuuaccuuuuaagucacaaa

SEQ ID NO: 4974 - RNA, 22 nt, Artificial Sequence
  Synthesized RNAi sequence
uagcacaaguuguagguauuug

SEQ ID NO: 4975 - RNA, 22 nt, Artificial Sequence
  Synthesized RNAi sequence
uaggauuuggaugaucuaugug

SEQ ID NO: 4976 - RNA, 22 nt, Artificial Sequence
  Synthesized RNAi sequence
uagguauuuguacauacuuacc

SEQ ID NO: 4977 - RNA, 22 nt, Artificial Sequence
  Synthesized RNAi sequence
uauguggcaacggcaguacaga

SEQ ID NO: 4978 - RNA, 22 nt, Artificial Sequence
  Synthesized RNAi sequence
uauugccugaccaguaccagug

SEQ ID NO: 4979 - RNA, 22 nt, Artificial Sequence
  Synthesized RNAi sequence
uauuggcuuccgguguaacugu

SEQ ID NO: 4980 - RNA, 22 nt, Artificial Sequence
  Synthesized RNAi sequence
ucacaaaauccuuuaggauuug

SEQ ID NO: 4981 - RNA, 22 nt, Artificial Sequence
  Synthesized RNAi sequence
ucacaacuacagccauaaccuu

SEQ ID NO: 4982 - RNA, 22 nt, Artificial Sequence
  Synthesized RNAi sequence
ucagcugacugaagcauggguu

SEQ ID NO: 4983 - RNA, 22 nt, Artificial Sequence
  Synthesized RNAi sequence
ucauuagcacaaguuguaggua

SEQ ID NO: 4984 - RNA, 22 nt, Artificial Sequence
  Synthesized RNAi sequence
uccauauuggcuuccgguguaa

SEQ ID NO: 4985 - RNA, 22 nt, Artificial Sequence
  Synthesized RNAi sequence
uccgguguaacuguuauugccu

SEQ ID NO: 4986 - RNA, 22 nt, Artificial Sequence
  Synthesized RNAi sequence
uccuuuaggauuuggaugaucu

SEQ ID NO: 4987 - RNA, 22 nt, Artificial Sequence
  Synthesized RNAi sequence
ucgcggaguugaucacaacuac

SEQ ID NO: 4988 - RNA, 22 nt, Artificial Sequence
  Synthesized RNAi sequence
ucuacagcaaaagcacagaaag

SEQ ID NO: 4989 - RNA, 22 nt, Artificial Sequence
  Synthesized RNAi sequence
ucuauguggcaacggcaguaca

SEQ ID NO: 4990 - RNA, 22 nt, Artificial Sequence
  Synthesized RNAi sequence
ucuugauccauauuggcuuccg

SEQ ID NO: 4991 - RNA, 22 nt, Artificial Sequence
  Synthesized RNAi sequence
ucuuuguaagcuuuagcagcau

SEQ ID NO: 4992 - RNA, 22 nt, Artificial Sequence
  Synthesized RNAi sequence
ugaagcauggguucgcggaguu

SEQ ID NO: 4993 - RNA, 22 nt, Artificial Sequence
  Synthesized RNAi sequence
ugaccaguaccaguguguguac

SEQ ID NO: 4994 - RNA, 22 nt, Artificial Sequence
  Synthesized RNAi sequence
ugacugaagcauggguucgcgg

SEQ ID NO: 4995 - RNA, 22 nt, Artificial Sequence
  Synthesized RNAi sequence
ugaucacaacuacagccauaac

SEQ ID NO: 4996 - RNA, 22 nt, Artificial Sequence
  Synthesized RNAi sequence
ugauccauauuggcuuccggug

SEQ ID NO: 4997 - RNA, 22 nt, Artificial Sequence
  Synthesized RNAi sequence
ugaucuauguggcaacggcagu

SEQ ID NO: 4998 - RNA, 22 nt, Artificial Sequence
  Synthesized RNAi sequence
ugcaccaccaaaggauucuuga

SEQ ID NO: 4999 - RNA, 22 nt, Artificial Sequence
  Synthesized RNAi sequence
ugccugaccaguaccagugugu

SEQ ID NO: 5000 - RNA, 22 nt, Artificial Sequence
  Synthesized RNAi sequence
uggaugaucuauguggcaacgg

SEQ ID NO: 5001 - RNA, 22 nt, Artificial Sequence
  Synthesized RNAi sequence
uggcaacggcaguacagacaac

SEQ ID NO: 5002 - RNA, 22 nt, Artificial Sequence
  Synthesized RNAi sequence
uggcuuccgguguaacuguuau

SEQ ID NO: 5003 - RNA, 22 nt, Artificial Sequence
  Synthesized RNAi sequence
uggguucgcggaguugaucaca

SEQ ID NO: 5004 - RNA, 22 nt, Artificial Sequence
  Synthesized RNAi sequence
uguaacuguuauugccugacca

SEQ ID NO: 5005 - RNA, 22 nt, Artificial Sequence
  Synthesized RNAi sequence
uguaagcuuuagcagcaucuac

SEQ ID NO: 5006 - RNA, 22 nt, Artificial Sequence
  Synthesized RNAi sequence
uguacacaacaucuuaacacaa

SEQ ID NO: 5007 - RNA, 22 nt, Artificial Sequence
  Synthesized RNAi sequence
uguacauacuuaccuuuuaagu

SEQ ID NO: 5008 - RNA, 22 nt, Artificial Sequence
  Synthesized RNAi sequence
uguagguauuuguacauacuua

SEQ ID NO: 5009 - RNA, 22 nt, Artificial Sequence
  Synthesized RNAi sequence
uguggcaacggcaguacagaca

SEQ ID NO: 5010 - RNA, 22 nt, Artificial Sequence
  Synthesized RNAi sequence
uguguacacaacaucuuaacac

SEQ ID NO: 5011 - RNA, 22 nt, Artificial Sequence
  Synthesized RNAi sequence
uguguguacacaacaucuuaac

SEQ ID NO: 5012 - RNA, 22 nt, Artificial Sequence
  Synthesized RNAi sequence
uguuauugccugaccaguacca

SEQ ID NO: 5013 - RNA, 22 nt, Artificial Sequence
  Synthesized RNAi sequence
uuaagucacaaaauccuuuagg

SEQ ID NO: 5014 - RNA, 22 nt, Artificial Sequence
  Synthesized RNAi sequence
uuaccuuuuaagucacaaaauc

SEQ ID NO: 5015 - RNA, 22 nt, Artificial Sequence
  Synthesized RNAi sequence
uuagcacaaguuguagguauuu

SEQ ID NO: 5016 - RNA, 22 nt, Artificial Sequence
  Synthesized RNAi sequence
uuaggauuuggaugaucuaugu

SEQ ID NO: 5017 - RNA, 22 nt, Artificial Sequence
  Synthesized RNAi sequence
uuauugccugaccaguaccagu

SEQ ID NO: 5018 - RNA, 22 nt, Artificial Sequence
  Synthesized RNAi sequence
uuccgguguaacuguuauugcc

SEQ ID NO: 5019 - RNA, 22 nt, Artificial Sequence
  Synthesized RNAi sequence
uucgcggaguugaucacaacua

SEQ ID NO: 5020 - RNA, 22 nt, Artificial Sequence
  Synthesized RNAi sequence
uucuugauccauauuggcuucc

SEQ ID NO: 5021 - RNA, 22 nt, Artificial Sequence
  Synthesized RNAi sequence
uugaucacaacuacagccauaa

SEQ ID NO: 5022 - RNA, 22 nt, Artificial Sequence
  Synthesized RNAi sequence
uugauccauauuggcuuccggu

SEQ ID NO: 5023 - RNA, 22 nt, Artificial Sequence
  Synthesized RNAi sequence
uugccugaccaguaccagugug

SEQ ID NO: 5024 - RNA, 22 nt, Artificial Sequence
  Synthesized RNAi sequence
uuggaugaucuauguggcaacg

SEQ ID NO: 5025 - RNA, 22 nt, Artificial Sequence
  Synthesized RNAi sequence
uuggcuuccgguguaacuguua

SEQ ID NO: 5026 - RNA, 22 nt, Artificial Sequence
  Synthesized RNAi sequence
uuguaagcuuuagcagcaucua

SEQ ID NO: 5027 - RNA, 22 nt, Artificial Sequence
  Synthesized RNAi sequence
uuguacauacuuaccuuuuaag

SEQ ID NO: 5028 - RNA, 22 nt, Artificial Sequence
  Synthesized RNAi sequence
uuguagguauuuguacauacuu

SEQ ID NO: 5029 - RNA, 22 nt, Artificial Sequence
  Synthesized RNAi sequence
uuuaagucacaaaauccuuuag

SEQ ID NO: 5030 - RNA, 22 nt, Artificial Sequence
  Synthesized RNAi sequence
uuuagcagcaucuacagcaaaa

SEQ ID NO: 5031 - RNA, 22 nt, Artificial Sequence
  Synthesized RNAi sequence
uuuaggauuuggaugaucuaug

SEQ ID NO: 5032 - RNA, 22 nt, Artificial Sequence
  Synthesized RNAi sequence
uuuggaugaucuauguggcaac

SEQ ID NO: 5033 - RNA, 22 nt, Artificial Sequence
  Synthesized RNAi sequence
uuuguaagcuuuagcagcaucu

SEQ ID NO: 5034 - RNA, 22 nt, Artificial Sequence
  Synthesized RNAi sequence
uuuguacauacuuaccuuuuaa

SEQ ID NO: 5035 - RNA, 22 nt, Artificial Sequence
  Synthesized RNAi sequence
uuuuaagucacaaaauccuuua

SEQ ID NO: 5036 - RNA, 22 nt, Artificial Sequence
  Synthesized RNAi sequence
aagacgggcugcacuuacaccg

SEQ ID NO: 5037 - RNA, 22 nt, Artificial Sequence
  Synthesized RNAi sequence
acgguguaagacgggcugcacu

SEQ ID NO: 5038 - RNA, 22 nt, Artificial Sequence
  Synthesized RNAi sequence
uaagacgggcugcacuuacacc

SEQ ID NO: 5039 - RNA, 22 nt, Artificial Sequence
  Synthesized RNAi sequence
uguaagacgggcugcacuuaca

SEQ ID NO: 5040 - RNA, 22 nt, Artificial Sequence
  Synthesized RNAi sequence
aaacacgcacagaauuuugagc

SEQ ID NO: 5041 - RNA, 22 nt, Artificial Sequence
  Synthesized RNAi sequence
aaaccuuucacaguuuccacaa

SEQ ID NO: 5042 - RNA, 22 nt, Artificial Sequence
  Synthesized RNAi sequence
aaacucuacaccuuccuuaaac

SEQ ID NO: 5043 - RNA, 22 nt, Artificial Sequence
  Synthesized RNAi sequence
aaacugguguaccaaccaaugg

SEQ ID NO: 5044 - RNA, 22 nt, Artificial Sequence
  Synthesized RNAi sequence
aaacuucucuucaagccaauca

SEQ ID NO: 5045 - RNA, 22 nt, Artificial Sequence
  Synthesized RNAi sequence
aaagaaugucugaacacucucc

SEQ ID NO: 5046 - RNA, 22 nt, Artificial Sequence
  Synthesized RNAi sequence
aaagaggacucaguauugauuu

SEQ ID NO: 5047 - RNA, 22 nt, Artificial Sequence
  Synthesized RNAi sequence
aaagauguuaguuagccacugc

SEQ ID NO: 5048 - RNA, 22 nt, Artificial Sequence
  Synthesized RNAi sequence
aaaggcaauagugcgaccaccc

SEQ ID NO: 5049 - RNA, 22 nt, Artificial Sequence
  Synthesized RNAi sequence
aaaggcacauuugguugcauuc

SEQ ID NO: 5050 - RNA, 22 nt, Artificial Sequence
  Synthesized RNAi sequence
aaagucaccaacaauauugaug

SEQ ID NO: 5051 - RNA, 22 nt, Artificial Sequence
  Synthesized RNAi sequence
aaaguccaguuguucggacaaa

SEQ ID NO: 5052 - RNA, 22 nt, Artificial Sequence
  Synthesized RNAi sequence
aaagugcaugaagcuuuaccag

SEQ ID NO: 5053 - RNA, 22 nt, Artificial Sequence
  Synthesized RNAi sequence
aaauacaaaauuuggacauucc

SEQ ID NO: 5054 - RNA, 22 nt, Artificial Sequence
  Synthesized RNAi sequence
aaaucaccaguuuucaagacaa

SEQ ID NO: 5055 - RNA, 22 nt, Artificial Sequence
  Synthesized RNAi sequence
aaaucagaugugaacaucauag

SEQ ID NO: 5056 - RNA, 22 nt, Artificial Sequence
  Synthesized RNAi sequence
aaaucgcccgucugccaugaag

SEQ ID NO: 5057 - RNA, 22 nt, Artificial Sequence
  Synthesized RNAi sequence
aaaugcauaaagaggacucagu

SEQ ID NO: 5058 - RNA, 22 nt, Artificial Sequence
  Synthesized RNAi sequence
aaauguuucaccuaaauucaag

SEQ ID NO: 5059 - RNA, 22 nt, Artificial Sequence
  Synthesized RNAi sequence
aaauuaccacaggauucaacaa

SEQ ID NO: 5060 - RNA, 22 nt, Artificial Sequence
  Synthesized RNAi sequence
aaauucaaggcuuuaaguuuag

SEQ ID NO: 5061 - RNA, 22 nt, Artificial Sequence
  Synthesized RNAi sequence
aaauuccaucuaguauuguuau

SEQ ID NO: 5062 - RNA, 22 nt, Artificial Sequence
  Synthesized RNAi sequence
aaauucgcaaguggcuuuaaca

SEQ ID NO: 5063 - RNA, 22 nt, Artificial Sequence
  Synthesized RNAi sequence
aaauucucagugccacaaaauu

SEQ ID NO: 5064 - RNA, 22 nt, Artificial Sequence
  Synthesized RNAi sequence
aaauugaucguacaacacgagc

SEQ ID NO: 5065 - RNA, 22 nt, Artificial Sequence
  Synthesized RNAi sequence
aaauuuaacaauuucccaaccg

SEQ ID NO: 5066 - RNA, 22 nt, Artificial Sequence
  Synthesized RNAi sequence
aaauuucuuugccaauuuaauu

SEQ ID NO: 5067 - RNA, 22 nt, Artificial Sequence
  Synthesized RNAi sequence
aaauuuggacauuccccauuga

SEQ ID NO: 5068 - RNA, 22 nt, Artificial Sequence
  Synthesized RNAi sequence
aacaaaaucgcccgucugccau

SEQ ID NO: 5069 - RNA, 22 nt, Artificial Sequence
  Synthesized RNAi sequence
aacaacaccaccuguaauguag

SEQ ID NO: 5070 - RNA, 22 nt, Artificial Sequence
  Synthesized RNAi sequence
aacaacaccuguaugguuacaa

SEQ ID NO: 5071 - RNA, 22 nt, Artificial Sequence
  Synthesized RNAi sequence
aacaacagcauuuugggguaag

SEQ ID NO: 5072 - RNA, 22 nt, Artificial Sequence
  Synthesized RNAi sequence
aacaauuucccaaccgucucua

SEQ ID NO: 5073 - RNA, 22 nt, Artificial Sequence
  Synthesized RNAi sequence
aacaauuuguuugaaugcuuua

SEQ ID NO: 5074 - RNA, 22 nt, Artificial Sequence
  Synthesized RNAi sequence
aacacacagccuccaaaggcaa

SEQ ID NO: 5075 - RNA, 22 nt, Artificial Sequence
  Synthesized RNAi sequence
aacacacuuucuguacaauccc

SEQ ID NO: 5076 - RNA, 22 nt, Artificial Sequence
  Synthesized RNAi sequence
aacaccaccuguaauguaggcc

SEQ ID NO: 5077 - RNA, 22 nt, Artificial Sequence
  Synthesized RNAi sequence
aacaccuguaugguuacaaccu

SEQ ID NO: 5078 - RNA, 22 nt, Artificial Sequence
  Synthesized RNAi sequence
aacacgagcagccucugaugca

SEQ ID NO: 5079 - RNA, 22 nt, Artificial Sequence
  Synthesized RNAi sequence
aacacgcacagaauuuugagca

SEQ ID NO: 5080 - RNA, 22 nt, Artificial Sequence
  Synthesized RNAi sequence
aacacucuccuuaauuuccuuu

SEQ ID NO: 5081 - RNA, 22 nt, Artificial Sequence
  Synthesized RNAi sequence
aacacuucugugggaaguguuu

SEQ ID NO: 5082 - RNA, 22 nt, Artificial Sequence
  Synthesized RNAi sequence
aacagcauuuugggguaaguaa

SEQ ID NO: 5083 - RNA, 22 nt, Artificial Sequence
  Synthesized RNAi sequence
aacagcuucacuaguagguugu

SEQ ID NO: 5084 - RNA, 22 nt, Artificial Sequence
  Synthesized RNAi sequence
aacauaagagaacacacagccu

SEQ ID NO: 5085 - RNA, 22 nt, Artificial Sequence
  Synthesized RNAi sequence
aacauaagcccguuaauacaaa

SEQ ID NO: 5086 - RNA, 22 nt, Artificial Sequence
  Synthesized RNAi sequence
aacaucauagcaucaaugaguc

SEQ ID NO: 5087 - RNA, 22 nt, Artificial Sequence
  Synthesized RNAi sequence
aaccaacauaagagaacacaca

SEQ ID NO: 5088 - RNA, 22 nt, Artificial Sequence
  Synthesized RNAi sequence
aaccaauggagcuucaacagcu

SEQ ID NO: 5089 - RNA, 22 nt, Artificial Sequence
  Synthesized RNAi sequence
aaccacaaguaguggcaccuuc

SEQ ID NO: 5090 - RNA, 22 nt, Artificial Sequence
  Synthesized RNAi sequence
aacccaauaggcacacuuguua

SEQ ID NO: 5091 - RNA, 22 nt, Artificial Sequence
  Synthesized RNAi sequence
aaccgucucuaagaaacucuac

SEQ ID NO: 5092 - RNA, 22 nt, Artificial Sequence
  Synthesized RNAi sequence
aaccuauguuagcgcuagcacg

SEQ ID NO: 5093 - RNA, 22 nt, Artificial Sequence
  Synthesized RNAi sequence
aaccuucuccaacaacaccugu

SEQ ID NO: 5094 - RNA, 22 nt, Artificial Sequence
  Synthesized RNAi sequence
aaccuuucacaguuuccacaaa

SEQ ID NO: 5095 - RNA, 22 nt, Artificial Sequence
  Synthesized RNAi sequence
aaccuuuguuggugcaccgccu

SEQ ID NO: 5096 - RNA, 22 nt, Artificial Sequence
  Synthesized RNAi sequence
aacuagauuguuaguagccaaa

SEQ ID NO: 5097 - RNA, 22 nt, Artificial Sequence
  Synthesized RNAi sequence
aacucuacaccuuccuuaaacu

SEQ ID NO: 5098 - RNA, 22 nt, Artificial Sequence
  Synthesized RNAi sequence
aacugaacaacaccaccuguaa

SEQ ID NO: 5099 - RNA, 22 nt, Artificial Sequence
  Synthesized RNAi sequence
aacugguguaccaaccaaugga

SEQ ID NO: 5100 - RNA, 22 nt, Artificial Sequence
  Synthesized RNAi sequence
aacuuccucuguuaacacuucu

SEQ ID NO: 5101 - RNA, 22 nt, Artificial Sequence
  Synthesized RNAi sequence
aacuucucuucaagccaaucaa

SEQ ID NO: 5102 - RNA, 22 nt, Artificial Sequence
  Synthesized RNAi sequence
aacuuuaaaauuaccacaggau

SEQ ID NO: 5103 - RNA, 22 nt, Artificial Sequence
  Synthesized RNAi sequence
aagaaacucuacaccuuccuua

SEQ ID NO: 5104 - RNA, 22 nt, Artificial Sequence
  Synthesized RNAi sequence
aagaagauaauuucuuuugggg

SEQ ID NO: 5105 - RNA, 22 nt, Artificial Sequence
  Synthesized RNAi sequence
aagaagguugucauuaagaccu

SEQ ID NO: 5106 - RNA, 22 nt, Artificial Sequence
  Synthesized RNAi sequence
aagaaugguuuucaagccagau

SEQ ID NO: 5107 - RNA, 22 nt, Artificial Sequence
  Synthesized RNAi sequence
aagaaugucugaacacucuccu

SEQ ID NO: 5108 - RNA, 22 nt, Artificial Sequence
  Synthesized RNAi sequence
aagacaacuuccucuguuaaca

SEQ ID NO: 5109 - RNA, 22 nt, Artificial Sequence
  Synthesized RNAi sequence
aagaccuucggaaccuucucca

SEQ ID NO: 5110 - RNA, 22 nt, Artificial Sequence
  Synthesized RNAi sequence
aagacuaugcucagguccuacu

SEQ ID NO: 5111 - RNA, 22 nt, Artificial Sequence
  Synthesized RNAi sequence
aagaggacucaguauugauuuc

SEQ ID NO: 5112 - RNA, 22 nt, Artificial Sequence
  Synthesized RNAi sequence
aagaggguagccaucagggcca

SEQ ID NO: 5113 - RNA, 22 nt, Artificial Sequence
  Synthesized RNAi sequence
aagagugcgggagaaaauugau

SEQ ID NO: 5114 - RNA, 22 nt, Artificial Sequence
  Synthesized RNAi sequence
aagauaauuucuuuuggggcuu

SEQ ID NO: 5115 - RNA, 22 nt, Artificial Sequence
  Synthesized RNAi sequence
aagauguuaguuagccacugcg

SEQ ID NO: 5116 - RNA, 22 nt, Artificial Sequence
  Synthesized RNAi sequence
aagcaauuucaugcucauguuc

SEQ ID NO: 5117 - RNA, 22 nt, Artificial Sequence
  Synthesized RNAi sequence
aagcacagguugagauaaauuu

SEQ ID NO: 5118 - RNA, 22 nt, Artificial Sequence
  Synthesized RNAi sequence
aagccagauucauuaugguauu

SEQ ID NO: 5119 - RNA, 22 nt, Artificial Sequence
  Synthesized RNAi sequence
aagcccguuaauacaaacuggu

SEQ ID NO: 5120 - RNA, 22 nt, Artificial Sequence
  Synthesized RNAi sequence
aagcuuuaccagcacgugcuag

SEQ ID NO: 5121 - RNA, 22 nt, Artificial Sequence
  Synthesized RNAi sequence
aaggcaauagugcgaccacccu

SEQ ID NO: 5122 - RNA, 22 nt, Artificial Sequence
  Synthesized RNAi sequence
aaggcacauuugguugcauuca

SEQ ID NO: 5123 - RNA, 22 nt, Artificial Sequence
  Synthesized RNAi sequence
aaggcuuuaaguuuagcuccac

SEQ ID NO: 5124 - RNA, 22 nt, Artificial Sequence
  Synthesized RNAi sequence
aagggaaauacaaaauuuggac

SEQ ID NO: 5125 - RNA, 22 nt, Artificial Sequence
  Synthesized RNAi sequence
aagggcacaguacuuuucugug

SEQ ID NO: 5126 - RNA, 22 nt, Artificial Sequence
  Synthesized RNAi sequence
aaggucuuuaaugcacucaaga

SEQ ID NO: 5127 - RNA, 22 nt, Artificial Sequence
  Synthesized RNAi sequence
aaggugucugcaauucauagcu

SEQ ID NO: 5128 - RNA, 22 nt, Artificial Sequence
  Synthesized RNAi sequence
aagguugucauuaagaccuucg

SEQ ID NO: 5129 - RNA, 22 nt, Artificial Sequence
  Synthesized RNAi sequence
aaguaaccacaaguaguggcac

SEQ ID NO: 5130 - RNA, 22 nt, Artificial Sequence
  Synthesized RNAi sequence
aaguaaccuuuguuggugcacc

SEQ ID NO: 5131 - RNA, 22 nt, Artificial Sequence
  Synthesized RNAi sequence
aagucaacugaacaacaccacc

SEQ ID NO: 5132 - RNA, 22 nt, Artificial Sequence
  Synthesized RNAi sequence
aaguccaguuguucggacaaag

SEQ ID NO: 5133 - RNA, 22 nt, Artificial Sequence
  Synthesized RNAi sequence
aagugcaugaagcuuuaccagc

SEQ ID NO: 5134 - RNA, 22 nt, Artificial Sequence
  Synthesized RNAi sequence
aaguggcuuuaacaaaaucgcc

SEQ ID NO: 5135 - RNA, 22 nt, Artificial Sequence
  Synthesized RNAi sequence
aaguguuucucccucuaagaag

SEQ ID NO: 5136 - RNA, 22 nt, Artificial Sequence
  Synthesized RNAi sequence
aaguuuaaagucaccaacaaua

SEQ ID NO: 5137 - RNA, 22 nt, Artificial Sequence
  Synthesized RNAi sequence
aaguuuagcuccaccaauaaug

SEQ ID NO: 5138 - RNA, 22 nt, Artificial Sequence
  Synthesized RNAi sequence
aaguuucaccacaaugaucaca

SEQ ID NO: 5139 - RNA, 22 nt, Artificial Sequence
  Synthesized RNAi sequence
aauaaaguccaguuguucggac

SEQ ID NO: 5140 - RNA, 22 nt, Artificial Sequence
  Synthesized RNAi sequence
aauacaaaauuuggacauuccc

SEQ ID NO: 5141 - RNA, 22 nt, Artificial Sequence
  Synthesized RNAi sequence
aauacaaacugguguaccaacc

SEQ ID NO: 5142 - RNA, 22 nt, Artificial Sequence
  Synthesized RNAi sequence
aauacugugaaauuccaucuag

SEQ ID NO: 5143 - RNA, 22 nt, Artificial Sequence
  Synthesized RNAi sequence
aauaggcacacuuguuauggca

SEQ ID NO: 5144 - RNA, 22 nt, Artificial Sequence
  Synthesized RNAi sequence
aauagucuugauuauggaauuu

SEQ ID NO: 5145 - RNA, 22 nt, Artificial Sequence
  Synthesized RNAi sequence
aauagugcgaccacccuuacga

SEQ ID NO: 5146 - RNA, 22 nt, Artificial Sequence
  Synthesized RNAi sequence
aaucaccaguuuucaagacaac

SEQ ID NO: 5147 - RNA, 22 nt, Artificial Sequence
  Synthesized RNAi sequence
aaucagaugugaacaucauagc

SEQ ID NO: 5148 - RNA, 22 nt, Artificial Sequence
  Synthesized RNAi sequence
aauccaaaccuuucacaguuuc

SEQ ID NO: 5149 - RNA, 22 nt, Artificial Sequence
  Synthesized RNAi sequence
aaucccuuugagugcgugacaa

SEQ ID NO: 5150 - RNA, 22 nt, Artificial Sequence
  Synthesized RNAi sequence
aaucgcccgucugccaugaagu

SEQ ID NO: 5151 - RNA, 22 nt, Artificial Sequence
  Synthesized RNAi sequence
aaugagucucagugaauacugu

SEQ ID NO: 5152 - RNA, 22 nt, Artificial Sequence
  Synthesized RNAi sequence
aaugaucacacuucaugagagu

SEQ ID NO: 5153 - RNA, 22 nt, Artificial Sequence
  Synthesized RNAi sequence
aaugcacucaagaggguagcca

SEQ ID NO: 5154 - RNA, 22 nt, Artificial Sequence
  Synthesized RNAi sequence
aaugcauaaagaggacucagua

SEQ ID NO: 5155 - RNA, 22 nt, Artificial Sequence
  Synthesized RNAi sequence
aaugcuuuauaauccaaaccuu

SEQ ID NO: 5156 - RNA, 22 nt, Artificial Sequence
  Synthesized RNAi sequence
aauggagcuucaacagcuucac

SEQ ID NO: 5157 - RNA, 22 nt, Artificial Sequence
  Synthesized RNAi sequence
aauggcgaucucuucauuaagu

SEQ ID NO: 5158 - RNA, 22 nt, Artificial Sequence
  Synthesized RNAi sequence
aaugguuguaaaucaccaguuu

SEQ ID NO: 5159 - RNA, 22 nt, Artificial Sequence
  Synthesized RNAi sequence
aaugguuuucaagccagauuca

SEQ ID NO: 5160 - RNA, 22 nt, Artificial Sequence
  Synthesized RNAi sequence
aauguaggccauuacaacuaga

SEQ ID NO: 5161 - RNA, 22 nt, Artificial Sequence
  Synthesized RNAi sequence
aaugucugaacacucuccuuaa

SEQ ID NO: 5162 - RNA, 22 nt, Artificial Sequence
  Synthesized RNAi sequence
aauguuucaccuaaauucaagg

SEQ ID NO: 5163 - RNA, 22 nt, Artificial Sequence
  Synthesized RNAi sequence
aauucaaggcuuuaaguuuagc

SEQ ID NO: 5164 - RNA, 22 nt, Artificial Sequence
  Synthesized RNAi sequence
aauucauagcucuuuucagaac

SEQ ID NO: 5165 - RNA, 22 nt, Artificial Sequence
  Synthesized RNAi sequence
aauuccaucuaguauuguuaua

SEQ ID NO: 5166 - RNA, 22 nt, Artificial Sequence
  Synthesized RNAi sequence
aauucgcaaguggcuuuaacaa

SEQ ID NO: 5167 - RNA, 22 nt, Artificial Sequence
  Synthesized RNAi sequence
aauucucagugccacaaaauuc

SEQ ID NO: 5168 - RNA, 22 nt, Artificial Sequence
  Synthesized RNAi sequence
aauugaucguacaacacgagca

SEQ ID NO: 5169 - RNA, 22 nt, Artificial Sequence
  Synthesized RNAi sequence
aauugugacaugcuggacaaua

SEQ ID NO: 5170 - RNA, 22 nt, Artificial Sequence
  Synthesized RNAi sequence
aauuuaacaauuucccaaccgu

SEQ ID NO: 5171 - RNA, 22 nt, Artificial Sequence
  Synthesized RNAi sequence
aauuuaauuucaaaaggugucu

SEQ ID NO: 5172 - RNA, 22 nt, Artificial Sequence
  Synthesized RNAi sequence
aauuucacaagcacagguugag

SEQ ID NO: 5173 - RNA, 22 nt, Artificial Sequence
  Synthesized RNAi sequence
aauuucaugcucauguucacgg

SEQ ID NO: 5174 - RNA, 22 nt, Artificial Sequence
  Synthesized RNAi sequence
aauuucccaaccgucucuaaga

SEQ ID NO: 5175 - RNA, 22 nt, Artificial Sequence
  Synthesized RNAi sequence
aauuuccuuugcacaggugaca

SEQ ID NO: 5176 - RNA, 22 nt, Artificial Sequence
  Synthesized RNAi sequence
aauuucuuugccaauuuaauuu

SEQ ID NO: 5177 - RNA, 22 nt, Artificial Sequence
  Synthesized RNAi sequence
aauuucuuuuggggcuuuuaga

SEQ ID NO: 5178 - RNA, 22 nt, Artificial Sequence
  Synthesized RNAi sequence
aauuuggacauuccccauugaa

SEQ ID NO: 5179 - RNA, 22 nt, Artificial Sequence
  Synthesized RNAi sequence
aauuuguccaccgacaauuuca

SEQ ID NO: 5180 - RNA, 22 nt, Artificial Sequence
  Synthesized RNAi sequence
aauuuguuugaaugcuuuauaa

SEQ ID NO: 5181 - RNA, 22 nt, Artificial Sequence
  Synthesized RNAi sequence
aauuuuaacaacagcauuuugg

SEQ ID NO: 5182 - RNA, 22 nt, Artificial Sequence
  Synthesized RNAi sequence
aauuuugagcaguuucaagagu

SEQ ID NO: 5183 - RNA, 22 nt, Artificial Sequence
  Synthesized RNAi sequence
acaaaaucgcccgucugccaug

SEQ ID NO: 5184 - RNA, 22 nt, Artificial Sequence
  Synthesized RNAi sequence
acaaaauucgcaaguggcuuua

SEQ ID NO: 5185 - RNA, 22 nt, Artificial Sequence
  Synthesized RNAi sequence
acaaaauuuggacauuccccau

SEQ ID NO: 5186 - RNA, 22 nt, Artificial Sequence
  Synthesized RNAi sequence
acaaagugcaugaagcuuuacc

SEQ ID NO: 5187 - RNA, 22 nt, Artificial Sequence
  Synthesized RNAi sequence
acaaauguuucaccuaaauuca

SEQ ID NO: 5188 - RNA, 22 nt, Artificial Sequence
  Synthesized RNAi sequence
acaacaccaccuguaauguagg

SEQ ID NO: 5189 - RNA, 22 nt, Artificial Sequence
  Synthesized RNAi sequence
acaacaccuguaugguuacaac

SEQ ID NO: 5190 - RNA, 22 nt, Artificial Sequence
  Synthesized RNAi sequence
acaacacgagcagccucugaug

SEQ ID NO: 5191 - RNA, 22 nt, Artificial Sequence
  Synthesized RNAi sequence
acaacagcauuuugggguaagu

SEQ ID NO: 5192 - RNA, 22 nt, Artificial Sequence
  Synthesized RNAi sequence
acaaccuauguuagcgcuagca

SEQ ID NO: 5193 - RNA, 22 nt, Artificial Sequence
  Synthesized RNAi sequence
acaacuagauuguuaguagcca

SEQ ID NO: 5194 - RNA, 22 nt, Artificial Sequence
  Synthesized RNAi sequence
acaacuuccucuguuaacacuu

SEQ ID NO: 5195 - RNA, 22 nt, Artificial Sequence
  Synthesized RNAi sequence
acaagcacagguugagauaaau

SEQ ID NO: 5196 - RNA, 22 nt, Artificial Sequence
  Synthesized RNAi sequence
acaaguaguggcaccuucuuua

SEQ ID NO: 5197 - RNA, 22 nt, Artificial Sequence
  Synthesized RNAi sequence
acaauaaauuuuaacaacagca

SEQ ID NO: 5198 - RNA, 22 nt, Artificial Sequence
  Synthesized RNAi sequence
acaaucccuuugagugcgugac

SEQ ID NO: 5199 - RNA, 22 nt, Artificial Sequence
  Synthesized RNAi sequence
acaaugaucacacuucaugaga

SEQ ID NO: 5200 - RNA, 22 nt, Artificial Sequence
  Synthesized RNAi sequence
acaauuucacaagcacagguug

SEQ ID NO: 5201 - RNA, 22 nt, Artificial Sequence
  Synthesized RNAi sequence
acaauuucccaaccgucucuaa

SEQ ID NO: 5202 - RNA, 22 nt, Artificial Sequence
  Synthesized RNAi sequence
acaauuuguuugaaugcuuuau

SEQ ID NO: 5203 - RNA, 22 nt, Artificial Sequence
  Synthesized RNAi sequence
acacacuuucuguacaaucccu

SEQ ID NO: 5204 - RNA, 22 nt, Artificial Sequence
  Synthesized RNAi sequence
acacagccuccaaaggcaauag

SEQ ID NO: 5205 - RNA, 22 nt, Artificial Sequence
  Synthesized RNAi sequence
acaccaccuguaauguaggcca

SEQ ID NO: 5206 - RNA, 22 nt, Artificial Sequence
  Synthesized RNAi sequence
acaccccucuuagugucaauaa

SEQ ID NO: 5207 - RNA, 22 nt, Artificial Sequence
  Synthesized RNAi sequence
acaccuguaugguuacaaccua

SEQ ID NO: 5208 - RNA, 22 nt, Artificial Sequence
  Synthesized RNAi sequence
acaccuuccuuaaacuucucuu

SEQ ID NO: 5209 - RNA, 22 nt, Artificial Sequence
  Synthesized RNAi sequence
acacgagcagccucugaugcaa

SEQ ID NO: 5210 - RNA, 22 nt, Artificial Sequence
  Synthesized RNAi sequence
acacgcacagaauuuugagcag

SEQ ID NO: 5211 - RNA, 22 nt, Artificial Sequence
  Synthesized RNAi sequence
acacucuccuuaauuuccuuug

SEQ ID NO: 5212 - RNA, 22 nt, Artificial Sequence
  Synthesized RNAi sequence
acacuucaugagaguugaaagg

SEQ ID NO: 5213 - RNA, 22 nt, Artificial Sequence
  Synthesized RNAi sequence
acacuucugugggaaguguuuc

SEQ ID NO: 5214 - RNA, 22 nt, Artificial Sequence
  Synthesized RNAi sequence
acacuuguuauggcaaccaaca

SEQ ID NO: 5215 - RNA, 22 nt, Artificial Sequence
  Synthesized RNAi sequence
acacuuucuguacaaucccuuu

SEQ ID NO: 5216 - RNA, 22 nt, Artificial Sequence
  Synthesized RNAi sequence
acagaauuuugagcaguuucaa

SEQ ID NO: 5217 - RNA, 22 nt, Artificial Sequence
  Synthesized RNAi sequence
acagcauuuugggguaaguaac

SEQ ID NO: 5218 - RNA, 22 nt, Artificial Sequence
  Synthesized RNAi sequence
acagccuccaaaggcaauagug

SEQ ID NO: 5219 - RNA, 22 nt, Artificial Sequence
  Synthesized RNAi sequence
acagcuucacuaguagguuguu

SEQ ID NO: 5220 - RNA, 22 nt, Artificial Sequence
  Synthesized RNAi sequence
acaggauucaacaauuuguuug

SEQ ID NO: 5221 - RNA, 22 nt, Artificial Sequence
  Synthesized RNAi sequence
acaggugacaauuuguccaccg

SEQ ID NO: 5222 - RNA, 22 nt, Artificial Sequence
  Synthesized RNAi sequence
acagguugagauaaauuuaaca

SEQ ID NO: 5223 - RNA, 22 nt, Artificial Sequence
  Synthesized RNAi sequence
acaguacuuuucugugucuuug

SEQ ID NO: 5224 - RNA, 22 nt, Artificial Sequence
  Synthesized RNAi sequence
acagugucaucaccaaaaguaa

SEQ ID NO: 5225 - RNA, 22 nt, Artificial Sequence
  Synthesized RNAi sequence
acauaagagaacacacagccuc

SEQ ID NO: 5226 - RNA, 22 nt, Artificial Sequence
  Synthesized RNAi sequence
acauaagcccguuaauacaaac

SEQ ID NO: 5227 - RNA, 22 nt, Artificial Sequence
  Synthesized RNAi sequence
acaucauagcaucaaugagucu

SEQ ID NO: 5228 - RNA, 22 nt, Artificial Sequence
  Synthesized RNAi sequence
acaugcuggacaauaaauuuua

SEQ ID NO: 5229 - RNA, 22 nt, Artificial Sequence
  Synthesized RNAi sequence
acauuccccauugaagguguca

SEQ ID NO: 5230 - RNA, 22 nt, Artificial Sequence
  Synthesized RNAi sequence
accaaaaguaaccuuuguuggu

SEQ ID NO: 5231 - RNA, 22 nt, Artificial Sequence
  Synthesized RNAi sequence
accaacauaagagaacacacag

SEQ ID NO: 5232 - RNA, 22 nt, Artificial Sequence
  Synthesized RNAi sequence
accaaccaauggagcuucaaca

SEQ ID NO: 5233 - RNA, 22 nt, Artificial Sequence
  Synthesized RNAi sequence
accaagcaauuucaugcucaug

SEQ ID NO: 5234 - RNA, 22 nt, Artificial Sequence
  Synthesized RNAi sequence
accaauggagcuucaacagcuu

SEQ ID NO: 5235 - RNA, 22 nt, Artificial Sequence
  Synthesized RNAi sequence
accacaaguaguggcaccuucu

SEQ ID NO: 5236 - RNA, 22 nt, Artificial Sequence
  Synthesized RNAi sequence
accacaaugaucacacuucaug

SEQ ID NO: 5237 - RNA, 22 nt, Artificial Sequence
  Synthesized RNAi sequence
accacaggauucaacaauuugu

SEQ ID NO: 5238 - RNA, 22 nt, Artificial Sequence
  Synthesized RNAi sequence
accacccuuacgaagaaugguu

SEQ ID NO: 5239 - RNA, 22 nt, Artificial Sequence
  Synthesized RNAi sequence
accaccuguaauguaggccauu

SEQ ID NO: 5240 - RNA, 22 nt, Artificial Sequence
  Synthesized RNAi sequence
accagcacgugcuagaaggucu

SEQ ID NO: 5241 - RNA, 22 nt, Artificial Sequence
  Synthesized RNAi sequence
accaguuuucaagacaacuucc

SEQ ID NO: 5242 - RNA, 22 nt, Artificial Sequence
  Synthesized RNAi sequence
accaucauauuaggugcaaggg

SEQ ID NO: 5243 - RNA, 22 nt, Artificial Sequence
  Synthesized RNAi sequence
acccaauaggcacacuuguuau

SEQ ID NO: 5244 - RNA, 22 nt, Artificial Sequence
  Synthesized RNAi sequence
accccucuuagugucaauaaag

SEQ ID NO: 5245 - RNA, 22 nt, Artificial Sequence
  Synthesized RNAi sequence
accgacaauuucacaagcacag

SEQ ID NO: 5246 - RNA, 22 nt, Artificial Sequence
  Synthesized RNAi sequence
accgccuuugagugugaaggua

SEQ ID NO: 5247 - RNA, 22 nt, Artificial Sequence
  Synthesized RNAi sequence
accgucucuaagaaacucuaca

SEQ ID NO: 5248 - RNA, 22 nt, Artificial Sequence
  Synthesized RNAi sequence
accuaaauucaaggcuuuaagu

SEQ ID NO: 5249 - RNA, 22 nt, Artificial Sequence
  Synthesized RNAi sequence
accuauguuagcgcuagcacgu

SEQ ID NO: 5250 - RNA, 22 nt, Artificial Sequence
  Synthesized RNAi sequence
accuguaauguaggccauuaca

SEQ ID NO: 5251 - RNA, 22 nt, Artificial Sequence
  Synthesized RNAi sequence
accuguaugguuacaaccuaug

SEQ ID NO: 5252 - RNA, 22 nt, Artificial Sequence
  Synthesized RNAi sequence
accuuccuuaaacuucucuuca

SEQ ID NO: 5253 - RNA, 22 nt, Artificial Sequence
  Synthesized RNAi sequence
accuucggaaccuucuccaaca

SEQ ID NO: 5254 - RNA, 22 nt, Artificial Sequence
  Synthesized RNAi sequence
accuucuccaacaacaccugua

SEQ ID NO: 5255 - RNA, 22 nt, Artificial Sequence
  Synthesized RNAi sequence
accuucuuuagucaaauucuca

SEQ ID NO: 5256 - RNA, 22 nt, Artificial Sequence
  Synthesized RNAi sequence
accuuucacaguuuccacaaaa

SEQ ID NO: 5257 - RNA, 22 nt, Artificial Sequence
  Synthesized RNAi sequence
accuuuguuggugcaccgccuu

SEQ ID NO: 5258 - RNA, 22 nt, Artificial Sequence
  Synthesized RNAi sequence
acgaagaaugguuuucaagcca

SEQ ID NO: 5259 - RNA, 22 nt, Artificial Sequence
  Synthesized RNAi sequence
acgagcagccucugaugcaaau

SEQ ID NO: 5260 - RNA, 22 nt, Artificial Sequence
  Synthesized RNAi sequence
acgcacagaauuuugagcaguu

SEQ ID NO: 5261 - RNA, 22 nt, Artificial Sequence
  Synthesized RNAi sequence
acggcagcaguauacaccccuc

SEQ ID NO: 5262 - RNA, 22 nt, Artificial Sequence
  Synthesized RNAi sequence
acgugcuagaaggucuuuaaug

SEQ ID NO: 5263 - RNA, 22 nt, Artificial Sequence
  Synthesized RNAi sequence
acguggaacccaauaggcacac

SEQ ID NO: 5264 - RNA, 22 nt, Artificial Sequence
  Synthesized RNAi sequence
acguuccguguaccaagcaauu

SEQ ID NO: 5265 - RNA, 22 nt, Artificial Sequence
  Synthesized RNAi sequence
acuagauuguuaguagccaaau

SEQ ID NO: 5266 - RNA, 22 nt, Artificial Sequence
  Synthesized RNAi sequence
acuaguagguuguucuaauggu

SEQ ID NO: 5267 - RNA, 22 nt, Artificial Sequence
  Synthesized RNAi sequence
acuaugcucagguccuacuucu

SEQ ID NO: 5268 - RNA, 22 nt, Artificial Sequence
  Synthesized RNAi sequence
acucaagaggguagccaucagg

SEQ ID NO: 5269 - RNA, 22 nt, Artificial Sequence
  Synthesized RNAi sequence
acucaguauugauuucuguuca

SEQ ID NO: 5270 - RNA, 22 nt, Artificial Sequence
  Synthesized RNAi sequence
acucuacaccuuccuuaaacuu

SEQ ID NO: 5271 - RNA, 22 nt, Artificial Sequence
  Synthesized RNAi sequence
acucuccuuaauuuccuuugca

SEQ ID NO: 5272 - RNA, 22 nt, Artificial Sequence
  Synthesized RNAi sequence
acugaacaacaccaccuguaau

SEQ ID NO: 5273 - RNA, 22 nt, Artificial Sequence
  Synthesized RNAi sequence
acugcgaagucaacugaacaac

SEQ ID NO: 5274 - RNA, 22 nt, Artificial Sequence
  Synthesized RNAi sequence
acugugaaauuccaucuaguau

SEQ ID NO: 5275 - RNA, 22 nt, Artificial Sequence
  Synthesized RNAi sequence
acuucaugagaguugaaaggca

SEQ ID NO: 5276 - RNA, 22 nt, Artificial Sequence
  Synthesized RNAi sequence
acuucucuucaagccaaucaag

SEQ ID NO: 5277 - RNA, 22 nt, Artificial Sequence
  Synthesized RNAi sequence
acuucugaauugugacaugcug

SEQ ID NO: 5278 - RNA, 22 nt, Artificial Sequence
  Synthesized RNAi sequence
acuucugugggaaguguuucuc

SEQ ID NO: 5279 - RNA, 22 nt, Artificial Sequence
  Synthesized RNAi sequence
acuuguuauggcaaccaacaua

SEQ ID NO: 5280 - RNA, 22 nt, Artificial Sequence
  Synthesized RNAi sequence
acuuuaaaauuaccacaggauu

SEQ ID NO: 5281 - RNA, 22 nt, Artificial Sequence
  Synthesized RNAi sequence
acuuucuguacaaucccuuuga

SEQ ID NO: 5282 - RNA, 22 nt, Artificial Sequence
  Synthesized RNAi sequence
acuuuucugugucuuugauuuc

SEQ ID NO: 5283 - RNA, 22 nt, Artificial Sequence
  Synthesized RNAi sequence
agaaaauugaucguacaacacg

SEQ ID NO: 5284 - RNA, 22 nt, Artificial Sequence
  Synthesized RNAi sequence
agaaacucuacaccuuccuuaa

SEQ ID NO: 5285 - RNA, 22 nt, Artificial Sequence
  Synthesized RNAi sequence
agaacacacagccuccaaaggc

SEQ ID NO: 5286 - RNA, 22 nt, Artificial Sequence
  Synthesized RNAi sequence
agaacguuccguguaccaagca

SEQ ID NO: 5287 - RNA, 22 nt, Artificial Sequence
  Synthesized RNAi sequence
agaagauaauuucuuuuggggc

SEQ ID NO: 5288 - RNA, 22 nt, Artificial Sequence
  Synthesized RNAi sequence
agaaggucuuuaaugcacucaa

SEQ ID NO: 5289 - RNA, 22 nt, Artificial Sequence
  Synthesized RNAi sequence
agaagguugucauuaagaccuu

SEQ ID NO: 5290 - RNA, 22 nt, Artificial Sequence
  Synthesized RNAi sequence
agaaugguuuucaagccagauu

SEQ ID NO: 5291 - RNA, 22 nt, Artificial Sequence
  Synthesized RNAi sequence
agaaugucugaacacucuccuu

SEQ ID NO: 5292 - RNA, 22 nt, Artificial Sequence
  Synthesized RNAi sequence
agaauuuugagcaguuucaaga

SEQ ID NO: 5293 - RNA, 22 nt, Artificial Sequence
  Synthesized RNAi sequence
agacaacuuccucuguuaacac

SEQ ID NO: 5294 - RNA, 22 nt, Artificial Sequence
  Synthesized RNAi sequence
agaccuucggaaccuucuccaa

SEQ ID NO: 5295 - RNA, 22 nt, Artificial Sequence
  Synthesized RNAi sequence
agacuaugcucagguccuacuu

SEQ ID NO: 5296 - RNA, 22 nt, Artificial Sequence
  Synthesized RNAi sequence
agagaacacacagccuccaaag

SEQ ID NO: 5297 - RNA, 22 nt, Artificial Sequence
  Synthesized RNAi sequence
agaggacucaguauugauuucu

SEQ ID NO: 5298 - RNA, 22 nt, Artificial Sequence
  Synthesized RNAi sequence
agaggcaugaguaggccaguuu

SEQ ID NO: 5299 - RNA, 22 nt, Artificial Sequence
  Synthesized RNAi sequence
agagugcgggagaaaauugauc

SEQ ID NO: 5300 - RNA, 22 nt, Artificial Sequence
  Synthesized RNAi sequence
agaguugaaaggcacauuuggu

SEQ ID NO: 5301 - RNA, 22 nt, Artificial Sequence
  Synthesized RNAi sequence
agauaaauuuaacaauuuccca

SEQ ID NO: 5302 - RNA, 22 nt, Artificial Sequence
  Synthesized RNAi sequence
agauaauuucuuuuggggcuuu

SEQ ID NO: 5303 - RNA, 22 nt, Artificial Sequence
  Synthesized RNAi sequence
agaugugaacaucauagcauca

SEQ ID NO: 5304 - RNA, 22 nt, Artificial Sequence
  Synthesized RNAi sequence
agauguuaguuagccacugcga

SEQ ID NO: 5305 - RNA, 22 nt, Artificial Sequence
  Synthesized RNAi sequence
agauucauuaugguauucggca

SEQ ID NO: 5306 - RNA, 22 nt, Artificial Sequence
  Synthesized RNAi sequence
agauuguuaguagccaaaucag

SEQ ID NO: 5307 - RNA, 22 nt, Artificial Sequence
  Synthesized RNAi sequence
agcaacauaagcccguuaauac

SEQ ID NO: 5308 - RNA, 22 nt, Artificial Sequence
  Synthesized RNAi sequence
agcaauuucaugcucauguuca

SEQ ID NO: 5309 - RNA, 22 nt, Artificial Sequence
  Synthesized RNAi sequence
agcacagguugagauaaauuua

SEQ ID NO: 5310 - RNA, 22 nt, Artificial Sequence
  Synthesized RNAi sequence
agcacgugcuagaaggucuuua

SEQ ID NO: 5311 - RNA, 22 nt, Artificial Sequence
  Synthesized RNAi sequence
agcacguggaacccaauaggca

SEQ ID NO: 5312 - RNA, 22 nt, Artificial Sequence
  Synthesized RNAi sequence
agcagccucugaugcaaaugca

SEQ ID NO: 5313 - RNA, 22 nt, Artificial Sequence
  Synthesized RNAi sequence
agcaguauacaccccucuuagu

SEQ ID NO: 5314 - RNA, 22 nt, Artificial Sequence
  Synthesized RNAi sequence
agcaguuucaagagugcgggag

SEQ ID NO: 5315 - RNA, 22 nt, Artificial Sequence
  Synthesized RNAi sequence
agcaucaaugagucucagugaa

SEQ ID NO: 5316 - RNA, 22 nt, Artificial Sequence
  Synthesized RNAi sequence
agcauuuugggguaaguaacca

SEQ ID NO: 5317 - RNA, 22 nt, Artificial Sequence
  Synthesized RNAi sequence
agccaaaucagaugugaacauc

SEQ ID NO: 5318 - RNA, 22 nt, Artificial Sequence
  Synthesized RNAi sequence
agccacugcgaagucaacugaa

SEQ ID NO: 5319 - RNA, 22 nt, Artificial Sequence
  Synthesized RNAi sequence
agccagauucauuaugguauuc

SEQ ID NO: 5320 - RNA, 22 nt, Artificial Sequence
  Synthesized RNAi sequence
agcccguuaauacaaacuggug

SEQ ID NO: 5321 - RNA, 22 nt, Artificial Sequence
  Synthesized RNAi sequence
agccuccaaaggcaauagugcg

SEQ ID NO: 5322 - RNA, 22 nt, Artificial Sequence
  Synthesized RNAi sequence
agccucugaugcaaaugcauaa

SEQ ID NO: 5323 - RNA, 22 nt, Artificial Sequence
  Synthesized RNAi sequence
agcgcuagcacguggaacccaa

SEQ ID NO: 5324 - RNA, 22 nt, Artificial Sequence
  Synthesized RNAi sequence
agcggccuucuguaaaacacgc

SEQ ID NO: 5325 - RNA, 22 nt, Artificial Sequence
  Synthesized RNAi sequence
agcuccaccaauaaugauagag

SEQ ID NO: 5326 - RNA, 22 nt, Artificial Sequence
  Synthesized RNAi sequence
agcucuuuucagaacguuccgu

SEQ ID NO: 5327 - RNA, 22 nt, Artificial Sequence
  Synthesized RNAi sequence
agcuuaaagaaugucugaacac

SEQ ID NO: 5328 - RNA, 22 nt, Artificial Sequence
  Synthesized RNAi sequence
agcuucaacagcuucacuagua

SEQ ID NO: 5329 - RNA, 22 nt, Artificial Sequence
  Synthesized RNAi sequence
agcuucacuaguagguuguucu

SEQ ID NO: 5330 - RNA, 22 nt, Artificial Sequence
  Synthesized RNAi sequence
agcuuuaccagcacgugcuaga

SEQ ID NO: 5331 - RNA, 22 nt, Artificial Sequence
  Synthesized RNAi sequence
aggacucaguauugauuucugu

SEQ ID NO: 5332 - RNA, 22 nt, Artificial Sequence
  Synthesized RNAi sequence
aggauucaacaauuuguuugaa

SEQ ID NO: 5333 - RNA, 22 nt, Artificial Sequence
  Synthesized RNAi sequence
aggcaauagugcgaccacccuu

SEQ ID NO: 5334 - RNA, 22 nt, Artificial Sequence
  Synthesized RNAi sequence
aggcacacuuguuauggcaacc

SEQ ID NO: 5335 - RNA, 22 nt, Artificial Sequence
  Synthesized RNAi sequence
aggcacauuugguugcauucau

SEQ ID NO: 5336 - RNA, 22 nt, Artificial Sequence
  Synthesized RNAi sequence
aggcaugaguaggccaguuucu

SEQ ID NO: 5337 - RNA, 22 nt, Artificial Sequence
  Synthesized RNAi sequence
aggccaguuucuucucuggauu

SEQ ID NO: 5338 - RNA, 22 nt, Artificial Sequence
  Synthesized RNAi sequence
aggccauuacaacuagauuguu

SEQ ID NO: 5339 - RNA, 22 nt, Artificial Sequence
  Synthesized RNAi sequence
aggcuuuaaguuuagcuccacc

SEQ ID NO: 5340 - RNA, 22 nt, Artificial Sequence
  Synthesized RNAi sequence
agguccuacuucugaauuguga

SEQ ID NO: 5341 - RNA, 22 nt, Artificial Sequence
  Synthesized RNAi sequence
aggucuuuaaugcacucaagag

SEQ ID NO: 5342 - RNA, 22 nt, Artificial Sequence
  Synthesized RNAi sequence
aggugacaauuuguccaccgac

SEQ ID NO: 5343 - RNA, 22 nt, Artificial Sequence
  Synthesized RNAi sequence
aggugcaagggcacaguacuuu

SEQ ID NO: 5344 - RNA, 22 nt, Artificial Sequence
  Synthesized RNAi sequence
aggugucaaauuucuuugccaa

SEQ ID NO: 5345 - RNA, 22 nt, Artificial Sequence
  Synthesized RNAi sequence
aggugucugcaauucauagcuc

SEQ ID NO: 5346 - RNA, 22 nt, Artificial Sequence
  Synthesized RNAi sequence
agguugucauuaagaccuucgg

SEQ ID NO: 5347 - RNA, 22 nt, Artificial Sequence
  Synthesized RNAi sequence
agguuguucuaaugguuguaaa

SEQ ID NO: 5348 - RNA, 22 nt, Artificial Sequence
  Synthesized RNAi sequence
aguaaccacaaguaguggcacc

SEQ ID NO: 5349 - RNA, 22 nt, Artificial Sequence
  Synthesized RNAi sequence
aguaaccuuuguuggugcaccg

SEQ ID NO: 5350 - RNA, 22 nt, Artificial Sequence
  Synthesized RNAi sequence
aguacuuuucugugucuuugau

SEQ ID NO: 5351 - RNA, 22 nt, Artificial Sequence
  Synthesized RNAi sequence
aguagccaaaucagaugugaac

SEQ ID NO: 5352 - RNA, 22 nt, Artificial Sequence
  Synthesized RNAi sequence
aguaggccaguuucuucucugg

SEQ ID NO: 5353 - RNA, 22 nt, Artificial Sequence
  Synthesized RNAi sequence
aguagguuguucuaaugguugu

SEQ ID NO: 5354 - RNA, 22 nt, Artificial Sequence
  Synthesized RNAi sequence
aguaguggcaccuucuuuaguc

SEQ ID NO: 5355 - RNA, 22 nt, Artificial Sequence
  Synthesized RNAi sequence
aguauacaccccucuuaguguc

SEQ ID NO: 5356 - RNA, 22 nt, Artificial Sequence
  Synthesized RNAi sequence
aguauuguuauagcggccuucu

SEQ ID NO: 5357 - RNA, 22 nt, Artificial Sequence
  Synthesized RNAi sequence
agucaaauucucagugccacaa

SEQ ID NO: 5358 - RNA, 22 nt, Artificial Sequence
  Synthesized RNAi sequence
agucaacugaacaacaccaccu

SEQ ID NO: 5359 - RNA, 22 nt, Artificial Sequence
  Synthesized RNAi sequence
aguccaguuguucggacaaagu

SEQ ID NO: 5360 - RNA, 22 nt, Artificial Sequence
  Synthesized RNAi sequence
agucuugauuauggaauuuaag

SEQ ID NO: 5361 - RNA, 22 nt, Artificial Sequence
  Synthesized RNAi sequence
agugaauacugugaaauuccau

SEQ ID NO: 5362 - RNA, 22 nt, Artificial Sequence
  Synthesized RNAi sequence
agugcaugaagcuuuaccagca

SEQ ID NO: 5363 - RNA, 22 nt, Artificial Sequence
  Synthesized RNAi sequence
agugccacaaaauucgcaagug

SEQ ID NO: 5364 - RNA, 22 nt, Artificial Sequence
  Synthesized RNAi sequence
agugcgggagaaaauugaucgu

SEQ ID NO: 5365 - RNA, 22 nt, Artificial Sequence
  Synthesized RNAi sequence
agugcgugacaaauguuucacc

SEQ ID NO: 5366 - RNA, 22 nt, Artificial Sequence
  Synthesized RNAi sequence
aguggcaccuucuuuagucaaa

SEQ ID NO: 5367 - RNA, 22 nt, Artificial Sequence
  Synthesized RNAi sequence
aguggcuuuaacaaaaucgccc

SEQ ID NO: 5368 - RNA, 22 nt, Artificial Sequence
  Synthesized RNAi sequence
agugucaauaaaguccaguugu

SEQ ID NO: 5369 - RNA, 22 nt, Artificial Sequence
  Synthesized RNAi sequence
agugucaucaccaaaaguaacc

SEQ ID NO: 5370 - RNA, 22 nt, Artificial Sequence
  Synthesized RNAi sequence
agugugaagguauuguuuguua

SEQ ID NO: 5371 - RNA, 22 nt, Artificial Sequence
  Synthesized RNAi sequence
aguguuucucccucuaagaaga

SEQ ID NO: 5372 - RNA, 22 nt, Artificial Sequence
  Synthesized RNAi sequence
aguuagccacugcgaagucaac

SEQ ID NO: 5373 - RNA, 22 nt, Artificial Sequence
  Synthesized RNAi sequence
aguugaaaggcacauuugguug

SEQ ID NO: 5374 - RNA, 22 nt, Artificial Sequence
  Synthesized RNAi sequence
aguuguucggacaaagugcaug

SEQ ID NO: 5375 - RNA, 22 nt, Artificial Sequence
  Synthesized RNAi sequence
aguuuaaagucaccaacaauau

SEQ ID NO: 5376 - RNA, 22 nt, Artificial Sequence
  Synthesized RNAi sequence
aguuucaagagugcgggagaaa

SEQ ID NO: 5377 - RNA, 22 nt, Artificial Sequence
  Synthesized RNAi sequence
aguuucaccacaaugaucacac

SEQ ID NO: 5378 - RNA, 22 nt, Artificial Sequence
  Synthesized RNAi sequence
aguuucuucucuggauuuaaca

SEQ ID NO: 5379 - RNA, 22 nt, Artificial Sequence
  Synthesized RNAi sequence
aguuuucaagacaacuuccucu

SEQ ID NO: 5380 - RNA, 22 nt, Artificial Sequence
  Synthesized RNAi sequence
auaaagaggacucaguauugau

SEQ ID NO: 5381 - RNA, 22 nt, Artificial Sequence
  Synthesized RNAi sequence
auaaaguccaguuguucggaca

SEQ ID NO: 5382 - RNA, 22 nt, Artificial Sequence
  Synthesized RNAi sequence
auaaauuuaacaauuucccaac

SEQ ID NO: 5383 - RNA, 22 nt, Artificial Sequence
  Synthesized RNAi sequence
auaagagaacacacagccucca

SEQ ID NO: 5384 - RNA, 22 nt, Artificial Sequence
  Synthesized RNAi sequence
auaagcccguuaauacaaacug

SEQ ID NO: 5385 - RNA, 22 nt, Artificial Sequence
  Synthesized RNAi sequence
auaauccaaaccuuucacaguu

SEQ ID NO: 5386 - RNA, 22 nt, Artificial Sequence
  Synthesized RNAi sequence
auaauuucuuuuggggcuuuua

SEQ ID NO: 5387 - RNA, 22 nt, Artificial Sequence
  Synthesized RNAi sequence
auacaaaauuuggacauucccc

SEQ ID NO: 5388 - RNA, 22 nt, Artificial Sequence
  Synthesized RNAi sequence
auacaaacugguguaccaacca

SEQ ID NO: 5389 - RNA, 22 nt, Artificial Sequence
  Synthesized RNAi sequence
auacugugaaauuccaucuagu

SEQ ID NO: 5390 - RNA, 22 nt, Artificial Sequence
  Synthesized RNAi sequence
auagcaucaaugagucucagug

SEQ ID NO: 5391 - RNA, 22 nt, Artificial Sequence
  Synthesized RNAi sequence
auagcggccuucuguaaaacac

SEQ ID NO: 5392 - RNA, 22 nt, Artificial Sequence
  Synthesized RNAi sequence
auagcucuuuucagaacguucc

SEQ ID NO: 5393 - RNA, 22 nt, Artificial Sequence
  Synthesized RNAi sequence
auaggcacacuuguuauggcaa

SEQ ID NO: 5394 - RNA, 22 nt, Artificial Sequence
  Synthesized RNAi sequence
auagugcgaccacccuuacgaa

SEQ ID NO: 5395 - RNA, 22 nt, Artificial Sequence
  Synthesized RNAi sequence
auauuaggugcaagggcacagu

SEQ ID NO: 5396 - RNA, 22 nt, Artificial Sequence
  Synthesized RNAi sequence
aucaaugagucucagugaauac

SEQ ID NO: 5397 - RNA, 22 nt, Artificial Sequence
  Synthesized RNAi sequence
aucacacuucaugagaguugaa

SEQ ID NO: 5398 - RNA, 22 nt, Artificial Sequence
  Synthesized RNAi sequence
aucaccaaaaguaaccuuuguu

SEQ ID NO: 5399 - RNA, 22 nt, Artificial Sequence
  Synthesized RNAi sequence
aucaccaguuuucaagacaacu

SEQ ID NO: 5400 - RNA, 22 nt, Artificial Sequence
  Synthesized RNAi sequence
aucagaugugaacaucauagca

SEQ ID NO: 5401 - RNA, 22 nt, Artificial Sequence
  Synthesized RNAi sequence
aucauagcaucaaugagucuca

SEQ ID NO: 5402 - RNA, 22 nt, Artificial Sequence
  Synthesized RNAi sequence
aucauauuaggugcaagggcac

SEQ ID NO: 5403 - RNA, 22 nt, Artificial Sequence
  Synthesized RNAi sequence
aucccuuugagugcgugacaaa

SEQ ID NO: 5404 - RNA, 22 nt, Artificial Sequence
  Synthesized RNAi sequence
aucgcccgucugccaugaaguu

SEQ ID NO: 5405 - RNA, 22 nt, Artificial Sequence
  Synthesized RNAi sequence
aucguacaacacgagcagccuc

SEQ ID NO: 5406 - RNA, 22 nt, Artificial Sequence
  Synthesized RNAi sequence
aucuaguauuguuauagcggcc

SEQ ID NO: 5407 - RNA, 22 nt, Artificial Sequence
  Synthesized RNAi sequence
aucucuucauuaaguuuaaagu

SEQ ID NO: 5408 - RNA, 22 nt, Artificial Sequence
  Synthesized RNAi sequence
augaagcuuuaccagcacgugc

SEQ ID NO: 5409 - RNA, 22 nt, Artificial Sequence
  Synthesized RNAi sequence
augaaguuucaccacaaugauc

SEQ ID NO: 5410 - RNA, 22 nt, Artificial Sequence
  Synthesized RNAi sequence
augagaguugaaaggcacauuu

SEQ ID NO: 5411 - RNA, 22 nt, Artificial Sequence
  Synthesized RNAi sequence
augagucucagugaauacugug

SEQ ID NO: 5412 - RNA, 22 nt, Artificial Sequence
  Synthesized RNAi sequence
augaucacacuucaugagaguu

SEQ ID NO: 5413 - RNA, 22 nt, Artificial Sequence
  Synthesized RNAi sequence
augcaaaugcauaaagaggacu

SEQ ID NO: 5414 - RNA, 22 nt, Artificial Sequence
  Synthesized RNAi sequence
augcacucaagaggguagccau

SEQ ID NO: 5415 - RNA, 22 nt, Artificial Sequence
  Synthesized RNAi sequence
augcauaaagaggacucaguau

SEQ ID NO: 5416 - RNA, 22 nt, Artificial Sequence
  Synthesized RNAi sequence
augcucagguccuacuucugaa

SEQ ID NO: 5417 - RNA, 22 nt, Artificial Sequence
  Synthesized RNAi sequence
augcucauguucacggcagcag

SEQ ID NO: 5418 - RNA, 22 nt, Artificial Sequence
  Synthesized RNAi sequence
augcuggacaauaaauuuuaac

SEQ ID NO: 5419 - RNA, 22 nt, Artificial Sequence
  Synthesized RNAi sequence
augcuuuauaauccaaaccuuu

SEQ ID NO: 5420 - RNA, 22 nt, Artificial Sequence
  Synthesized RNAi sequence
auggaauuuaagggaaauacaa

SEQ ID NO: 5421 - RNA, 22 nt, Artificial Sequence
  Synthesized RNAi sequence
auggagcuucaacagcuucacu

SEQ ID NO: 5422 - RNA, 22 nt, Artificial Sequence
  Synthesized RNAi sequence
auggcaaccaacauaagagaac

SEQ ID NO: 5423 - RNA, 22 nt, Artificial Sequence
  Synthesized RNAi sequence
auggcgaucucuucauuaaguu

SEQ ID NO: 5424 - RNA, 22 nt, Artificial Sequence
  Synthesized RNAi sequence
augguauucggcaagacuaugc

SEQ ID NO: 5425 - RNA, 22 nt, Artificial Sequence
  Synthesized RNAi sequence
augguuacaaccuauguuagcg

SEQ ID NO: 5426 - RNA, 22 nt, Artificial Sequence
  Synthesized RNAi sequence
augguuuucaagccagauucau

SEQ ID NO: 5427 - RNA, 22 nt, Artificial Sequence
  Synthesized RNAi sequence
auguaggccauuacaacuagau

SEQ ID NO: 5428 - RNA, 22 nt, Artificial Sequence
  Synthesized RNAi sequence
augucugaacacucuccuuaau

SEQ ID NO: 5429 - RNA, 22 nt, Artificial Sequence
  Synthesized RNAi sequence
auguuagcgcuagcacguggaa

SEQ ID NO: 5430 - RNA, 22 nt, Artificial Sequence
  Synthesized RNAi sequence
auguuaguuagccacugcgaag

SEQ ID NO: 5431 - RNA, 22 nt, Artificial Sequence
  Synthesized RNAi sequence
auguuucaccuaaauucaaggc

SEQ ID NO: 5432 - RNA, 22 nt, Artificial Sequence
  Synthesized RNAi sequence
auuaagaccuucggaaccuucu

SEQ ID NO: 5433 - RNA, 22 nt, Artificial Sequence
  Synthesized RNAi sequence
auuaaguuuaaagucaccaaca

SEQ ID NO: 5434 - RNA, 22 nt, Artificial Sequence
  Synthesized RNAi sequence
auuacaacuagauuguuaguag

SEQ ID NO: 5435 - RNA, 22 nt, Artificial Sequence
  Synthesized RNAi sequence
auuaccacaggauucaacaauu

SEQ ID NO: 5436 - RNA, 22 nt, Artificial Sequence
  Synthesized RNAi sequence
auuaggugcaagggcacaguac

SEQ ID NO: 5437 - RNA, 22 nt, Artificial Sequence
  Synthesized RNAi sequence
auuauggaauuuaagggaaaua

SEQ ID NO: 5438 - RNA, 22 nt, Artificial Sequence
  Synthesized RNAi sequence
auuaugguauucggcaagacua

SEQ ID NO: 5439 - RNA, 22 nt, Artificial Sequence
  Synthesized RNAi sequence
auucaacaauuuguuugaaugc

SEQ ID NO: 5440 - RNA, 22 nt, Artificial Sequence
  Synthesized RNAi sequence
auucaaggcuuuaaguuuagcu

SEQ ID NO: 5441 - RNA, 22 nt, Artificial Sequence
  Synthesized RNAi sequence
auucauagcucuuuucagaacg

SEQ ID NO: 5442 - RNA, 22 nt, Artificial Sequence
  Synthesized RNAi sequence
auucauuaugguauucggcaag

SEQ ID NO: 5443 - RNA, 22 nt, Artificial Sequence
  Synthesized RNAi sequence
auucauuuggugacgcaacugg

SEQ ID NO: 5444 - RNA, 22 nt, Artificial Sequence
  Synthesized RNAi sequence
auuccaucuaguauuguuauag

SEQ ID NO: 5445 - RNA, 22 nt, Artificial Sequence
  Synthesized RNAi sequence
auuccccauugaaggugucaaa

SEQ ID NO: 5446 - RNA, 22 nt, Artificial Sequence
  Synthesized RNAi sequence
auucgcaaguggcuuuaacaaa

SEQ ID NO: 5447 - RNA, 22 nt, Artificial Sequence
  Synthesized RNAi sequence
auucggcaagacuaugcucagg

SEQ ID NO: 5448 - RNA, 22 nt, Artificial Sequence
  Synthesized RNAi sequence
auucucagugccacaaaauucg

SEQ ID NO: 5449 - RNA, 22 nt, Artificial Sequence
  Synthesized RNAi sequence
auugaaggugucaaauuucuuu

SEQ ID NO: 5450 - RNA, 22 nt, Artificial Sequence
  Synthesized RNAi sequence
auugaucguacaacacgagcag

SEQ ID NO: 5451 - RNA, 22 nt, Artificial Sequence
  Synthesized RNAi sequence
auugauuucuguucaccaauau

SEQ ID NO: 5452 - RNA, 22 nt, Artificial Sequence
  Synthesized RNAi sequence
auugugacaugcuggacaauaa

SEQ ID NO: 5453 - RNA, 22 nt, Artificial Sequence
  Synthesized RNAi sequence
auuguuaguagccaaaucagau

SEQ ID NO: 5454 - RNA, 22 nt, Artificial Sequence
  Synthesized RNAi sequence
auuguuauagcggccuucugua

SEQ ID NO: 5455 - RNA, 22 nt, Artificial Sequence
  Synthesized RNAi sequence
auuguuuguuaccaucauauua

SEQ ID NO: 5456 - RNA, 22 nt, Artificial Sequence
  Synthesized RNAi sequence
auuuaacaauuucccaaccguc

SEQ ID NO: 5457 - RNA, 22 nt, Artificial Sequence
  Synthesized RNAi sequence
auuuaacacacuuucuguacaa

SEQ ID NO: 5458 - RNA, 22 nt, Artificial Sequence
  Synthesized RNAi sequence
auuuaauuucaaaaggugucug

SEQ ID NO: 5459 - RNA, 22 nt, Artificial Sequence
  Synthesized RNAi sequence
auuucaaaaggugucugcaauu

SEQ ID NO: 5460 - RNA, 22 nt, Artificial Sequence
  Synthesized RNAi sequence
auuucacaagcacagguugaga

SEQ ID NO: 5461 - RNA, 22 nt, Artificial Sequence
  Synthesized RNAi sequence
auuucaugcucauguucacggc

SEQ ID NO: 5462 - RNA, 22 nt, Artificial Sequence
  Synthesized RNAi sequence
auuucccaaccgucucuaagaa

SEQ ID NO: 5463 - RNA, 22 nt, Artificial Sequence
  Synthesized RNAi sequence
auuuccuuugcacaggugacaa

SEQ ID NO: 5464 - RNA, 22 nt, Artificial Sequence
  Synthesized RNAi sequence
auuucgagcaacauaagcccgu

SEQ ID NO: 5465 - RNA, 22 nt, Artificial Sequence
  Synthesized RNAi sequence
auuuggacauuccccauugaag

SEQ ID NO: 5466 - RNA, 22 nt, Artificial Sequence
  Synthesized RNAi sequence
auuugguugcauucauuuggug

SEQ ID NO: 5467 - RNA, 22 nt, Artificial Sequence
  Synthesized RNAi sequence
auuuguccaccgacaauuucac

SEQ ID NO: 5468 - RNA, 22 nt, Artificial Sequence
  Synthesized RNAi sequence
auuuguuugaaugcuuuauaau

SEQ ID NO: 5469 - RNA, 22 nt, Artificial Sequence
  Synthesized RNAi sequence
auuuuaacaacagcauuuuggg

SEQ ID NO: 5470 - RNA, 22 nt, Artificial Sequence
  Synthesized RNAi sequence
auuuugagcaguuucaagagug

SEQ ID NO: 5471 - RNA, 22 nt, Artificial Sequence
  Synthesized RNAi sequence
auuuugggguaaguaaccacaa

SEQ ID NO: 5472 - RNA, 22 nt, Artificial Sequence
  Synthesized RNAi sequence
uaaacuucucuucaagccaauc

SEQ ID NO: 5473 - RNA, 22 nt, Artificial Sequence
  Synthesized RNAi sequence
uaaagaaugucugaacacucuc

SEQ ID NO: 5474 - RNA, 22 nt, Artificial Sequence
  Synthesized RNAi sequence
uaaagaggacucaguauugauu

SEQ ID NO: 5475 - RNA, 22 nt, Artificial Sequence
  Synthesized RNAi sequence
uaaagucaccaacaauauugau

SEQ ID NO: 5476 - RNA, 22 nt, Artificial Sequence
  Synthesized RNAi sequence
uaaaguccaguuguucggacaa

SEQ ID NO: 5477 - RNA, 22 nt, Artificial Sequence
  Synthesized RNAi sequence
uaaaucaccaguuuucaagaca

SEQ ID NO: 5478 - RNA, 22 nt, Artificial Sequence
  Synthesized RNAi sequence
uaaauucaaggcuuuaaguuua

SEQ ID NO: 5479 - RNA, 22 nt, Artificial Sequence
  Synthesized RNAi sequence
uaaauuuaacaauuucccaacc

SEQ ID NO: 5480 - RNA, 22 nt, Artificial Sequence
  Synthesized RNAi sequence
uaacaaaaucgcccgucugcca

SEQ ID NO: 5481 - RNA, 22 nt, Artificial Sequence
  Synthesized RNAi sequence
uaacaacagcauuuugggguaa

SEQ ID NO: 5482 - RNA, 22 nt, Artificial Sequence
  Synthesized RNAi sequence
uaacaauuucccaaccgucucu

SEQ ID NO: 5483 - RNA, 22 nt, Artificial Sequence
  Synthesized RNAi sequence
uaacacacuuucuguacaaucc

SEQ ID NO: 5484 - RNA, 22 nt, Artificial Sequence
  Synthesized RNAi sequence
uaacacuucugugggaaguguu

SEQ ID NO: 5485 - RNA, 22 nt, Artificial Sequence
  Synthesized RNAi sequence
uaaccacaaguaguggcaccuu

SEQ ID NO: 5486 - RNA, 22 nt, Artificial Sequence
  Synthesized RNAi sequence
uaaccuuuguuggugcaccgcc

SEQ ID NO: 5487 - RNA, 22 nt, Artificial Sequence
  Synthesized RNAi sequence
uaacuuuaaaauuaccacagga

SEQ ID NO: 5488 - RNA, 22 nt, Artificial Sequence
  Synthesized RNAi sequence
uaagaaacucuacaccuuccuu

SEQ ID NO: 5489 - RNA, 22 nt, Artificial Sequence
  Synthesized RNAi sequence
uaagaagauaauuucuuuuggg

SEQ ID NO: 5490 - RNA, 22 nt, Artificial Sequence
  Synthesized RNAi sequence
uaagaccuucggaaccuucucc

SEQ ID NO: 5491 - RNA, 22 nt, Artificial Sequence
  Synthesized RNAi sequence
uaagagaacacacagccuccaa

SEQ ID NO: 5492 - RNA, 22 nt, Artificial Sequence
  Synthesized RNAi sequence
uaagcccguuaauacaaacugg

SEQ ID NO: 5493 - RNA, 22 nt, Artificial Sequence
  Synthesized RNAi sequence
uaagggaaauacaaaauuugga

SEQ ID NO: 5494 - RNA, 22 nt, Artificial Sequence
  Synthesized RNAi sequence
uaaguaaccacaaguaguggca

SEQ ID NO: 5495 - RNA, 22 nt, Artificial Sequence
  Synthesized RNAi sequence
uaaguuuagcuccaccaauaau

SEQ ID NO: 5496 - RNA, 22 nt, Artificial Sequence
  Synthesized RNAi sequence
uaauacaaacugguguaccaac

SEQ ID NO: 5497 - RNA, 22 nt, Artificial Sequence
  Synthesized RNAi sequence
uaauccaaaccuuucacaguuu

SEQ ID NO: 5498 - RNA, 22 nt, Artificial Sequence
  Synthesized RNAi sequence
uaaugcacucaagaggguagcc

SEQ ID NO: 5499 - RNA, 22 nt, Artificial Sequence
  Synthesized RNAi sequence
uaauggcgaucucuucauuaag

SEQ ID NO: 5500 - RNA, 22 nt, Artificial Sequence
  Synthesized RNAi sequence
uaaugguuguaaaucaccaguu

SEQ ID NO: 5501 - RNA, 22 nt, Artificial Sequence
  Synthesized RNAi sequence
uaauguaggccauuacaacuag

SEQ ID NO: 5502 - RNA, 22 nt, Artificial Sequence
  Synthesized RNAi sequence
uaauuucaaaaggugucugcaa

SEQ ID NO: 5503 - RNA, 22 nt, Artificial Sequence
  Synthesized RNAi sequence
uaauuuccuuugcacaggugac

SEQ ID NO: 5504 - RNA, 22 nt, Artificial Sequence
  Synthesized RNAi sequence
uaauuucuuuuggggcuuuuag

SEQ ID NO: 5505 - RNA, 22 nt, Artificial Sequence
  Synthesized RNAi sequence
uacaaaauuuggacauucccca

SEQ ID NO: 5506 - RNA, 22 nt, Artificial Sequence
  Synthesized RNAi sequence
uacaaacugguguaccaaccaa

SEQ ID NO: 5507 - RNA, 22 nt, Artificial Sequence
  Synthesized RNAi sequence
uacaacacgagcagccucugau

SEQ ID NO: 5508 - RNA, 22 nt, Artificial Sequence
  Synthesized RNAi sequence
uacaaccuauguuagcgcuagc

SEQ ID NO: 5509 - RNA, 22 nt, Artificial Sequence
  Synthesized RNAi sequence
uacaacuagauuguuaguagcc

SEQ ID NO: 5510 - RNA, 22 nt, Artificial Sequence
  Synthesized RNAi sequence
uacaaucccuuugagugcguga

SEQ ID NO: 5511 - RNA, 22 nt, Artificial Sequence
  Synthesized RNAi sequence
uacaccccucuuagugucaaua

SEQ ID NO: 5512 - RNA, 22 nt, Artificial Sequence
  Synthesized RNAi sequence
uacaccuuccuuaaacuucucu

SEQ ID NO: 5513 - RNA, 22 nt, Artificial Sequence
  Synthesized RNAi sequence
uaccaaccaauggagcuucaac

SEQ ID NO: 5514 - RNA, 22 nt, Artificial Sequence
  Synthesized RNAi sequence
uaccaagcaauuucaugcucau

SEQ ID NO: 5515 - RNA, 22 nt, Artificial Sequence
  Synthesized RNAi sequence
uaccacaggauucaacaauuug

SEQ ID NO: 5516 - RNA, 22 nt, Artificial Sequence
  Synthesized RNAi sequence
uaccagcacgugcuagaagguc

SEQ ID NO: 5517 - RNA, 22 nt, Artificial Sequence
  Synthesized RNAi sequence
uaccaucauauuaggugcaagg

SEQ ID NO: 5518 - RNA, 22 nt, Artificial Sequence
  Synthesized RNAi sequence
uacgaagaaugguuuucaagcc

SEQ ID NO: 5519 - RNA, 22 nt, Artificial Sequence
  Synthesized RNAi sequence
uacugugaaauuccaucuagua

SEQ ID NO: 5520 - RNA, 22 nt, Artificial Sequence
  Synthesized RNAi sequence
uacuucugaauugugacaugcu

SEQ ID NO: 5521 - RNA, 22 nt, Artificial Sequence
  Synthesized RNAi sequence
uacuuuucugugucuuugauuu

SEQ ID NO: 5522 - RNA, 22 nt, Artificial Sequence
  Synthesized RNAi sequence
uagaaggucuuuaaugcacuca

SEQ ID NO: 5523 - RNA, 22 nt, Artificial Sequence
  Synthesized RNAi sequence
uagaggcaugaguaggccaguu

SEQ ID NO: 5524 - RNA, 22 nt, Artificial Sequence
  Synthesized RNAi sequence
uagauuguuaguagccaaauca

SEQ ID NO: 5525 - RNA, 22 nt, Artificial Sequence
  Synthesized RNAi sequence
uagcacguggaacccaauaggc

SEQ ID NO: 5526 - RNA, 22 nt, Artificial Sequence
  Synthesized RNAi sequence
uagcaucaaugagucucaguga

SEQ ID NO: 5527 - RNA, 22 nt, Artificial Sequence
  Synthesized RNAi sequence
uagccaaaucagaugugaacau

SEQ ID NO: 5528 - RNA, 22 nt, Artificial Sequence
  Synthesized RNAi sequence
uagccacugcgaagucaacuga

SEQ ID NO: 5529 - RNA, 22 nt, Artificial Sequence
  Synthesized RNAi sequence
uagccaucagggccacagaagu

SEQ ID NO: 5530 - RNA, 22 nt, Artificial Sequence
  Synthesized RNAi sequence
uagcgcuagcacguggaaccca

SEQ ID NO: 5531 - RNA, 22 nt, Artificial Sequence
  Synthesized RNAi sequence
uagcuccaccaauaaugauaga

SEQ ID NO: 5532 - RNA, 22 nt, Artificial Sequence
  Synthesized RNAi sequence
uagcucuuuucagaacguuccg

SEQ ID NO: 5533 - RNA, 22 nt, Artificial Sequence
  Synthesized RNAi sequence
uaggcacacuuguuauggcaac

SEQ ID NO: 5534 - RNA, 22 nt, Artificial Sequence
  Synthesized RNAi sequence
uaggccaguuucuucucuggau

SEQ ID NO: 5535 - RNA, 22 nt, Artificial Sequence
  Synthesized RNAi sequence
uaggccauuacaacuagauugu

SEQ ID NO: 5536 - RNA, 22 nt, Artificial Sequence
  Synthesized RNAi sequence
uaggugcaagggcacaguacuu

SEQ ID NO: 5537 - RNA, 22 nt, Artificial Sequence
  Synthesized RNAi sequence
uagguuguucuaaugguuguaa

SEQ ID NO: 5538 - RNA, 22 nt, Artificial Sequence
  Synthesized RNAi sequence
uaguagccaaaucagaugugaa

SEQ ID NO: 5539 - RNA, 22 nt, Artificial Sequence
  Synthesized RNAi sequence
uaguagguuguucuaaugguug

SEQ ID NO: 5540 - RNA, 22 nt, Artificial Sequence
  Synthesized RNAi sequence
uaguauuguuauagcggccuuc

SEQ ID NO: 5541 - RNA, 22 nt, Artificial Sequence
  Synthesized RNAi sequence
uagucaaauucucagugccaca

SEQ ID NO: 5542 - RNA, 22 nt, Artificial Sequence
  Synthesized RNAi sequence
uaguggcaccuucuuuagucaa

SEQ ID NO: 5543 - RNA, 22 nt, Artificial Sequence
  Synthesized RNAi sequence
uagugucaauaaaguccaguug

SEQ ID NO: 5544 - RNA, 22 nt, Artificial Sequence
  Synthesized RNAi sequence
uaguuagccacugcgaagucaa

SEQ ID NO: 5545 - RNA, 22 nt, Artificial Sequence
  Synthesized RNAi sequence
uauaauccaaaccuuucacagu

SEQ ID NO: 5546 - RNA, 22 nt, Artificial Sequence
  Synthesized RNAi sequence
uauacaccccucuuagugucaa

SEQ ID NO: 5547 - RNA, 22 nt, Artificial Sequence
  Synthesized RNAi sequence
uauagcggccuucuguaaaaca

SEQ ID NO: 5548 - RNA, 22 nt, Artificial Sequence
  Synthesized RNAi sequence
uaugcucagguccuacuucuga

SEQ ID NO: 5549 - RNA, 22 nt, Artificial Sequence
  Synthesized RNAi sequence
uauggaauuuaagggaaauaca

SEQ ID NO: 5550 - RNA, 22 nt, Artificial Sequence
  Synthesized RNAi sequence
uauggcaaccaacauaagagaa

SEQ ID NO: 5551 - RNA, 22 nt, Artificial Sequence
  Synthesized RNAi sequence
uaugguauucggcaagacuaug

SEQ ID NO: 5552 - RNA, 22 nt, Artificial Sequence
  Synthesized RNAi sequence
uaugguuacaaccuauguuagc

SEQ ID NO: 5553 - RNA, 22 nt, Artificial Sequence
  Synthesized RNAi sequence
uauguuagcgcuagcacgugga

SEQ ID NO: 5554 - RNA, 22 nt, Artificial Sequence
  Synthesized RNAi sequence
uauuaggugcaagggcacagua

SEQ ID NO: 5555 - RNA, 22 nt, Artificial Sequence
  Synthesized RNAi sequence
uauucggcaagacuaugcucag

SEQ ID NO: 5556 - RNA, 22 nt, Artificial Sequence
  Synthesized RNAi sequence
uauugauuucuguucaccaaua

SEQ ID NO: 5557 - RNA, 22 nt, Artificial Sequence
  Synthesized RNAi sequence
uauuguuauagcggccuucugu

SEQ ID NO: 5558 - RNA, 22 nt, Artificial Sequence
  Synthesized RNAi sequence
uauuguuuguuaccaucauauu

SEQ ID NO: 5559 - RNA, 22 nt, Artificial Sequence
  Synthesized RNAi sequence
ucaaaaggugucugcaauucau

SEQ ID NO: 5560 - RNA, 22 nt, Artificial Sequence
  Synthesized RNAi sequence
ucaaauuucuuugccaauuuaa

SEQ ID NO: 5561 - RNA, 22 nt, Artificial Sequence
  Synthesized RNAi sequence
ucaacaauuuguuugaaugcuu

SEQ ID NO: 5562 - RNA, 22 nt, Artificial Sequence
  Synthesized RNAi sequence
ucaacagcuucacuaguagguu

SEQ ID NO: 5563 - RNA, 22 nt, Artificial Sequence
  Synthesized RNAi sequence
ucaacugaacaacaccaccugu

SEQ ID NO: 5564 - RNA, 22 nt, Artificial Sequence
  Synthesized RNAi sequence
ucaagacaacuuccucuguuaa

SEQ ID NO: 5565 - RNA, 22 nt, Artificial Sequence
  Synthesized RNAi sequence
ucaagaggguagccaucagggc

SEQ ID NO: 5566 - RNA, 22 nt, Artificial Sequence
  Synthesized RNAi sequence
ucaagagugcgggagaaaauug

SEQ ID NO: 5567 - RNA, 22 nt, Artificial Sequence
  Synthesized RNAi sequence
ucaagccagauucauuauggua

SEQ ID NO: 5568 - RNA, 22 nt, Artificial Sequence
  Synthesized RNAi sequence
ucaaggcuuuaaguuuagcucc

SEQ ID NO: 5569 - RNA, 22 nt, Artificial Sequence
  Synthesized RNAi sequence
ucaauaaaguccaguuguucgg

SEQ ID NO: 5570 - RNA, 22 nt, Artificial Sequence
  Synthesized RNAi sequence
ucaaugagucucagugaauacu

SEQ ID NO: 5571 - RNA, 22 nt, Artificial Sequence
  Synthesized RNAi sequence
ucacaagcacagguugagauaa

SEQ ID NO: 5572 - RNA, 22 nt, Artificial Sequence
  Synthesized RNAi sequence
ucacacuucaugagaguugaaa

SEQ ID NO: 5573 - RNA, 22 nt, Artificial Sequence
  Synthesized RNAi sequence
ucacaguuuccacaaaagcacu

SEQ ID NO: 5574 - RNA, 22 nt, Artificial Sequence
  Synthesized RNAi sequence
ucaccaaaaguaaccuuuguug

SEQ ID NO: 5575 - RNA, 22 nt, Artificial Sequence
  Synthesized RNAi sequence
ucaccacaaugaucacacuuca

SEQ ID NO: 5576 - RNA, 22 nt, Artificial Sequence
  Synthesized RNAi sequence
ucaccaguuuucaagacaacuu

SEQ ID NO: 5577 - RNA, 22 nt, Artificial Sequence
  Synthesized RNAi sequence
ucaccuaaauucaaggcuuuaa

SEQ ID NO: 5578 - RNA, 22 nt, Artificial Sequence
  Synthesized RNAi sequence
ucacggcagcaguauacacccc

SEQ ID NO: 5579 - RNA, 22 nt, Artificial Sequence
  Synthesized RNAi sequence
ucacuaguagguuguucuaaug

SEQ ID NO: 5580 - RNA, 22 nt, Artificial Sequence
  Synthesized RNAi sequence
ucagaacguuccguguaccaag

SEQ ID NO: 5581 - RNA, 22 nt, Artificial Sequence
  Synthesized RNAi sequence
ucagaugugaacaucauagcau

SEQ ID NO: 5582 - RNA, 22 nt, Artificial Sequence
  Synthesized RNAi sequence
ucagggccacagaaguuguuau

SEQ ID NO: 5583 - RNA, 22 nt, Artificial Sequence
  Synthesized RNAi sequence
ucagguccuacuucugaauugu

SEQ ID NO: 5584 - RNA, 22 nt, Artificial Sequence
  Synthesized RNAi sequence
ucaguauugauuucuguucacc

SEQ ID NO: 5585 - RNA, 22 nt, Artificial Sequence
  Synthesized RNAi sequence
ucagugaauacugugaaauucc

SEQ ID NO: 5586 - RNA, 22 nt, Artificial Sequence
  Synthesized RNAi sequence
ucauagcaucaaugagucucag

SEQ ID NO: 5587 - RNA, 22 nt, Artificial Sequence
  Synthesized RNAi sequence
ucauagcucuuuucagaacguu

SEQ ID NO: 5588 - RNA, 22 nt, Artificial Sequence
  Synthesized RNAi sequence
ucauauuaggugcaagggcaca

SEQ ID NO: 5589 - RNA, 22 nt, Artificial Sequence
  Synthesized RNAi sequence
ucaugagaguugaaaggcacau

SEQ ID NO: 5590 - RNA, 22 nt, Artificial Sequence
  Synthesized RNAi sequence
ucaugcucauguucacggcagc

SEQ ID NO: 5591 - RNA, 22 nt, Artificial Sequence
  Synthesized RNAi sequence
ucauguucacggcagcaguaua

SEQ ID NO: 5592 - RNA, 22 nt, Artificial Sequence
  Synthesized RNAi sequence
ucauuaagaccuucggaaccuu

SEQ ID NO: 5593 - RNA, 22 nt, Artificial Sequence
  Synthesized RNAi sequence
ucauuaaguuuaaagucaccaa

SEQ ID NO: 5594 - RNA, 22 nt, Artificial Sequence
  Synthesized RNAi sequence
ucauuaugguauucggcaagac

SEQ ID NO: 5595 - RNA, 22 nt, Artificial Sequence
  Synthesized RNAi sequence
ucauuuggugacgcaacuggau

SEQ ID NO: 5596 - RNA, 22 nt, Artificial Sequence
  Synthesized RNAi sequence
uccaaaccuuucacaguuucca

SEQ ID NO: 5597 - RNA, 22 nt, Artificial Sequence
  Synthesized RNAi sequence
uccaaaggcaauagugcgacca

SEQ ID NO: 5598 - RNA, 22 nt, Artificial Sequence
  Synthesized RNAi sequence
uccaacaacaccuguaugguua

SEQ ID NO: 5599 - RNA, 22 nt, Artificial Sequence
  Synthesized RNAi sequence
uccaccaauaaugauagaguca

SEQ ID NO: 5600 - RNA, 22 nt, Artificial Sequence
  Synthesized RNAi sequence
uccaccgacaauuucacaagca

SEQ ID NO: 5601 - RNA, 22 nt, Artificial Sequence
  Synthesized RNAi sequence
uccaguuguucggacaaagugc

SEQ ID NO: 5602 - RNA, 22 nt, Artificial Sequence
  Synthesized RNAi sequence
uccaucuaguauuguuauagcg

SEQ ID NO: 5603 - RNA, 22 nt, Artificial Sequence
  Synthesized RNAi sequence
ucccaaccgucucuaagaaacu

SEQ ID NO: 5604 - RNA, 22 nt, Artificial Sequence
  Synthesized RNAi sequence
uccccauugaaggugucaaauu

SEQ ID NO: 5605 - RNA, 22 nt, Artificial Sequence
  Synthesized RNAi sequence
ucccucuaagaagauaauuucu

SEQ ID NO: 5606 - RNA, 22 nt, Artificial Sequence
  Synthesized RNAi sequence
ucccuuugagugcgugacaaau

SEQ ID NO: 5607 - RNA, 22 nt, Artificial Sequence
  Synthesized RNAi sequence
uccguguaccaagcaauuucau

SEQ ID NO: 5608 - RNA, 22 nt, Artificial Sequence
  Synthesized RNAi sequence
uccuacuucugaauugugacau

SEQ ID NO: 5609 - RNA, 22 nt, Artificial Sequence
  Synthesized RNAi sequence
uccucuguuaacacuucugugg

SEQ ID NO: 5610 - RNA, 22 nt, Artificial Sequence
  Synthesized RNAi sequence
uccuuaaacuucucuucaagcc

SEQ ID NO: 5611 - RNA, 22 nt, Artificial Sequence
  Synthesized RNAi sequence
uccuuaauuuccuuugcacagg

SEQ ID NO: 5612 - RNA, 22 nt, Artificial Sequence
  Synthesized RNAi sequence
ucgagcaacauaagcccguuaa

SEQ ID NO: 5613 - RNA, 22 nt, Artificial Sequence
  Synthesized RNAi sequence
ucgcaaguggcuuuaacaaaau

SEQ ID NO: 5614 - RNA, 22 nt, Artificial Sequence
  Synthesized RNAi sequence
ucgcccgucugccaugaaguuu

SEQ ID NO: 5615 - RNA, 22 nt, Artificial Sequence
  Synthesized RNAi sequence
ucggaaccuucuccaacaacac

SEQ ID NO: 5616 - RNA, 22 nt, Artificial Sequence
  Synthesized RNAi sequence
ucggacaaagugcaugaagcuu

SEQ ID NO: 5617 - RNA, 22 nt, Artificial Sequence
  Synthesized RNAi sequence
ucggcaagacuaugcucagguc

SEQ ID NO: 5618 - RNA, 22 nt, Artificial Sequence
  Synthesized RNAi sequence
ucguacaacacgagcagccucu

SEQ ID NO: 5619 - RNA, 22 nt, Artificial Sequence
  Synthesized RNAi sequence
ucuaagaaacucuacaccuucc

SEQ ID NO: 5620 - RNA, 22 nt, Artificial Sequence
  Synthesized RNAi sequence
ucuaaugguuguaaaucaccag

SEQ ID NO: 5621 - RNA, 22 nt, Artificial Sequence
  Synthesized RNAi sequence
ucuacaccuuccuuaaacuucu

SEQ ID NO: 5622 - RNA, 22 nt, Artificial Sequence
  Synthesized RNAi sequence
ucuaguauuguuauagcggccu

SEQ ID NO: 5623 - RNA, 22 nt, Artificial Sequence
  Synthesized RNAi sequence
ucucagugaauacugugaaauu

SEQ ID NO: 5624 - RNA, 22 nt, Artificial Sequence
  Synthesized RNAi sequence
ucucagugccacaaaauucgca

SEQ ID NO: 5625 - RNA, 22 nt, Artificial Sequence
  Synthesized RNAi sequence
ucuccaacaacaccuguauggu

SEQ ID NO: 5626 - RNA, 22 nt, Artificial Sequence
  Synthesized RNAi sequence
ucucccucuaagaagauaauuu

SEQ ID NO: 5627 - RNA, 22 nt, Artificial Sequence
  Synthesized RNAi sequence
ucuccuuaauuuccuuugcaca

SEQ ID NO: 5628 - RNA, 22 nt, Artificial Sequence
  Synthesized RNAi sequence
ucucuaagaaacucuacaccuu

SEQ ID NO: 5629 - RNA, 22 nt, Artificial Sequence
  Synthesized RNAi sequence
ucucuggauuuaacacacuuuc

SEQ ID NO: 5630 - RNA, 22 nt, Artificial Sequence
  Synthesized RNAi sequence
ucucuucauuaaguuuaaaguc

SEQ ID NO: 5631 - RNA, 22 nt, Artificial Sequence
  Synthesized RNAi sequence
ucugaacacucuccuuaauuuc

SEQ ID NO: 5632 - RNA, 22 nt, Artificial Sequence
  Synthesized RNAi sequence
ucugaauugugacaugcuggac

SEQ ID NO: 5633 - RNA, 22 nt, Artificial Sequence
  Synthesized RNAi sequence
ucugaugcaaaugcauaaagag

SEQ ID NO: 5634 - RNA, 22 nt, Artificial Sequence
  Synthesized RNAi sequence
ucugccaugaaguuucaccaca

SEQ ID NO: 5635 - RNA, 22 nt, Artificial Sequence
  Synthesized RNAi sequence
ucuggauuuaacacacuuucug

SEQ ID NO: 5636 - RNA, 22 nt, Artificial Sequence
  Synthesized RNAi sequence
ucuguaaaacacgcacagaauu

SEQ ID NO: 5637 - RNA, 22 nt, Artificial Sequence
  Synthesized RNAi sequence
ucuguacaaucccuuugagugc

SEQ ID NO: 5638 - RNA, 22 nt, Artificial Sequence
  Synthesized RNAi sequence
ucugugggaaguguuucucccu

SEQ ID NO: 5639 - RNA, 22 nt, Artificial Sequence
  Synthesized RNAi sequence
ucuguuaacacuucugugggaa

SEQ ID NO: 5640 - RNA, 22 nt, Artificial Sequence
  Synthesized RNAi sequence
ucuuagugucaauaaaguccag

SEQ ID NO: 5641 - RNA, 22 nt, Artificial Sequence
  Synthesized RNAi sequence
ucuucauuaaguuuaaagucac

SEQ ID NO: 5642 - RNA, 22 nt, Artificial Sequence
  Synthesized RNAi sequence
ucuucucuggauuuaacacacu

SEQ ID NO: 5643 - RNA, 22 nt, Artificial Sequence
  Synthesized RNAi sequence
ucuugauuauggaauuuaaggg

SEQ ID NO: 5644 - RNA, 22 nt, Artificial Sequence
  Synthesized RNAi sequence
ucuuuaaugcacucaagagggu

SEQ ID NO: 5645 - RNA, 22 nt, Artificial Sequence
  Synthesized RNAi sequence
ucuuuagucaaauucucagugc

SEQ ID NO: 5646 - RNA, 22 nt, Artificial Sequence
  Synthesized RNAi sequence
ucuuugauuucgagcaacauaa

SEQ ID NO: 5647 - RNA, 22 nt, Artificial Sequence
  Synthesized RNAi sequence
ucuuugccaauuuaauuucaaa

SEQ ID NO: 5648 - RNA, 22 nt, Artificial Sequence
  Synthesized RNAi sequence
ucuuuucagaacguuccgugua

SEQ ID NO: 5649 - RNA, 22 nt, Artificial Sequence
  Synthesized RNAi sequence
ucuuuuggggcuuuuagaggca

SEQ ID NO: 5650 - RNA, 22 nt, Artificial Sequence
  Synthesized RNAi sequence
ugaaaggcacauuugguugcau

SEQ ID NO: 5651 - RNA, 22 nt, Artificial Sequence
  Synthesized RNAi sequence
ugaaauuccaucuaguauuguu

SEQ ID NO: 5652 - RNA, 22 nt, Artificial Sequence
  Synthesized RNAi sequence
ugaacaacaccaccuguaaugu

SEQ ID NO: 5653 - RNA, 22 nt, Artificial Sequence
  Synthesized RNAi sequence
ugaacacucuccuuaauuuccu

SEQ ID NO: 5654 - RNA, 22 nt, Artificial Sequence
  Synthesized RNAi sequence
ugaacaucauagcaucaaugag

SEQ ID NO: 5655 - RNA, 22 nt, Artificial Sequence
  Synthesized RNAi sequence
ugaagcuuuaccagcacgugcu

SEQ ID NO: 5656 - RNA, 22 nt, Artificial Sequence
  Synthesized RNAi sequence
ugaagguauuguuuguuaccau

SEQ ID NO: 5657 - RNA, 22 nt, Artificial Sequence
  Synthesized RNAi sequence
ugaaggugucaaauuucuuugc

SEQ ID NO: 5658 - RNA, 22 nt, Artificial Sequence
  Synthesized RNAi sequence
ugaaguuucaccacaaugauca

SEQ ID NO: 5659 - RNA, 22 nt, Artificial Sequence
  Synthesized RNAi sequence
ugaauacugugaaauuccaucu

SEQ ID NO: 5660 - RNA, 22 nt, Artificial Sequence
  Synthesized RNAi sequence
ugaaugcuuuauaauccaaacc

SEQ ID NO: 5661 - RNA, 22 nt, Artificial Sequence
  Synthesized RNAi sequence
ugaauugugacaugcuggacaa

SEQ ID NO: 5662 - RNA, 22 nt, Artificial Sequence
  Synthesized RNAi sequence
ugacaugcuggacaauaaauuu

SEQ ID NO: 5663 - RNA, 22 nt, Artificial Sequence
  Synthesized RNAi sequence
ugagaguugaaaggcacauuug

SEQ ID NO: 5664 - RNA, 22 nt, Artificial Sequence
  Synthesized RNAi sequence
ugagauaaauuuaacaauuucc

SEQ ID NO: 5665 - RNA, 22 nt, Artificial Sequence
  Synthesized RNAi sequence
ugagcaguuucaagagugcggg

SEQ ID NO: 5666 - RNA, 22 nt, Artificial Sequence
  Synthesized RNAi sequence
ugaguaggccaguuucuucucu

SEQ ID NO: 5667 - RNA, 22 nt, Artificial Sequence
  Synthesized RNAi sequence
ugagucucagugaauacuguga

SEQ ID NO: 5668 - RNA, 22 nt, Artificial Sequence
  Synthesized RNAi sequence
ugagugcgugacaaauguuuca

SEQ ID NO: 5669 - RNA, 22 nt, Artificial Sequence
  Synthesized RNAi sequence
ugagugugaagguauuguuugu

SEQ ID NO: 5670 - RNA, 22 nt, Artificial Sequence
  Synthesized RNAi sequence
ugaucacacuucaugagaguug

SEQ ID NO: 5671 - RNA, 22 nt, Artificial Sequence
  Synthesized RNAi sequence
ugaucguacaacacgagcagcc

SEQ ID NO: 5672 - RNA, 22 nt, Artificial Sequence
  Synthesized RNAi sequence
ugaugcaaaugcauaaagagga

SEQ ID NO: 5673 - RNA, 22 nt, Artificial Sequence
  Synthesized RNAi sequence
ugauuauggaauuuaagggaaa

SEQ ID NO: 5674 - RNA, 22 nt, Artificial Sequence
  Synthesized RNAi sequence
ugauuucgagcaacauaagccc

SEQ ID NO: 5675 - RNA, 22 nt, Artificial Sequence
  Synthesized RNAi sequence
ugcaaaugcauaaagaggacuc

SEQ ID NO: 5676 - RNA, 22 nt, Artificial Sequence
  Synthesized RNAi sequence
ugcaagggcacaguacuuuucu

SEQ ID NO: 5677 - RNA, 22 nt, Artificial Sequence
  Synthesized RNAi sequence
ugcaauucauagcucuuuucag

SEQ ID NO: 5678 - RNA, 22 nt, Artificial Sequence
  Synthesized RNAi sequence
ugcacaggugacaauuugucca

SEQ ID NO: 5679 - RNA, 22 nt, Artificial Sequence
  Synthesized RNAi sequence
ugcaccgccuuugagugugaag

SEQ ID NO: 5680 - RNA, 22 nt, Artificial Sequence
  Synthesized RNAi sequence
ugcacucaagaggguagccauc

SEQ ID NO: 5681 - RNA, 22 nt, Artificial Sequence
  Synthesized RNAi sequence
ugcaugaagcuuuaccagcacg

SEQ ID NO: 5682 - RNA, 22 nt, Artificial Sequence
  Synthesized RNAi sequence
ugccacaaaauucgcaaguggc

SEQ ID NO: 5683 - RNA, 22 nt, Artificial Sequence
  Synthesized RNAi sequence
ugcgaagucaacugaacaacac

SEQ ID NO: 5684 - RNA, 22 nt, Artificial Sequence
  Synthesized RNAi sequence
ugcgaccacccuuacgaagaau

SEQ ID NO: 5685 - RNA, 22 nt, Artificial Sequence
  Synthesized RNAi sequence
ugcgggagaaaauugaucguac

SEQ ID NO: 5686 - RNA, 22 nt, Artificial Sequence
  Synthesized RNAi sequence
ugcgugacaaauguuucaccua

SEQ ID NO: 5687 - RNA, 22 nt, Artificial Sequence
  Synthesized RNAi sequence
ugcuagaaggucuuuaaugcac

SEQ ID NO: 5688 - RNA, 22 nt, Artificial Sequence
  Synthesized RNAi sequence
ugcucauguucacggcagcagu

SEQ ID NO: 5689 - RNA, 22 nt, Artificial Sequence
  Synthesized RNAi sequence
ugcuggacaauaaauuuuaaca

SEQ ID NO: 5690 - RNA, 22 nt, Artificial Sequence
  Synthesized RNAi sequence
ugcuuuauaauccaaaccuuuc

SEQ ID NO: 5691 - RNA, 22 nt, Artificial Sequence
  Synthesized RNAi sequence
uggaacccaauaggcacacuug

SEQ ID NO: 5692 - RNA, 22 nt, Artificial Sequence
  Synthesized RNAi sequence
uggacaauaaauuuuaacaaca

SEQ ID NO: 5693 - RNA, 22 nt, Artificial Sequence
  Synthesized RNAi sequence
uggacauuccccauugaaggug

SEQ ID NO: 5694 - RNA, 22 nt, Artificial Sequence
  Synthesized RNAi sequence
uggauuuaacacacuuucugua

SEQ ID NO: 5695 - RNA, 22 nt, Artificial Sequence
  Synthesized RNAi sequence
uggcaaccaacauaagagaaca

SEQ ID NO: 5696 - RNA, 22 nt, Artificial Sequence
  Synthesized RNAi sequence
uggcaccuucuuuagucaaauu

SEQ ID NO: 5697 - RNA, 22 nt, Artificial Sequence
  Synthesized RNAi sequence
uggcgaucucuucauuaaguuu

SEQ ID NO: 5698 - RNA, 22 nt, Artificial Sequence
  Synthesized RNAi sequence
uggcuuuaacaaaaucgcccgu

SEQ ID NO: 5699 - RNA, 22 nt, Artificial Sequence
  Synthesized RNAi sequence
ugggaaguguuucucccucuaa

SEQ ID NO: 5700 - RNA, 22 nt, Artificial Sequence
  Synthesized RNAi sequence
uggggcuuuuagaggcaugagu

SEQ ID NO: 5701 - RNA, 22 nt, Artificial Sequence
  Synthesized RNAi sequence
ugggguaaguaaccacaaguag

SEQ ID NO: 5702 - RNA, 22 nt, Artificial Sequence
  Synthesized RNAi sequence
ugguauucggcaagacuaugcu

SEQ ID NO: 5703 - RNA, 22 nt, Artificial Sequence
  Synthesized RNAi sequence
uggugcaccgccuuugagugug

SEQ ID NO: 5704 - RNA, 22 nt, Artificial Sequence
  Synthesized RNAi sequence
ugguguaccaaccaauggagcu

SEQ ID NO: 5705 - RNA, 22 nt, Artificial Sequence
  Synthesized RNAi sequence
ugguuacaaccuauguuagcgc

SEQ ID NO: 5706 - RNA, 22 nt, Artificial Sequence
  Synthesized RNAi sequence
ugguugaauagucuugauuaug

SEQ ID NO: 5707 - RNA, 22 nt, Artificial Sequence
  Synthesized RNAi sequence
ugguugcauucauuuggugacg

SEQ ID NO: 5708 - RNA, 22 nt, Artificial Sequence
  Synthesized RNAi sequence
uguaaaucaccaguuuucaaga

SEQ ID NO: 5709 - RNA, 22 nt, Artificial Sequence
  Synthesized RNAi sequence
uguaacuuuaaaauuaccacag

SEQ ID NO: 5710 - RNA, 22 nt, Artificial Sequence
  Synthesized RNAi sequence
uguaauguaggccauuacaacu

SEQ ID NO: 5711 - RNA, 22 nt, Artificial Sequence
  Synthesized RNAi sequence
uguacaaucccuuugagugcgu

SEQ ID NO: 5712 - RNA, 22 nt, Artificial Sequence
  Synthesized RNAi sequence
uguaccaaccaauggagcuuca

SEQ ID NO: 5713 - RNA, 22 nt, Artificial Sequence
  Synthesized RNAi sequence
uguaccaagcaauuucaugcuc

SEQ ID NO: 5714 - RNA, 22 nt, Artificial Sequence
  Synthesized RNAi sequence
uguaugguuacaaccuauguua

SEQ ID NO: 5715 - RNA, 22 nt, Artificial Sequence
  Synthesized RNAi sequence
ugucaauaaaguccaguuguuc

SEQ ID NO: 5716 - RNA, 22 nt, Artificial Sequence
  Synthesized RNAi sequence
ugucaucaccaaaaguaaccuu

SEQ ID NO: 5717 - RNA, 22 nt, Artificial Sequence
  Synthesized RNAi sequence
ugucauuaagaccuucggaacc

SEQ ID NO: 5718 - RNA, 22 nt, Artificial Sequence
  Synthesized RNAi sequence
uguccaccgacaauuucacaag

SEQ ID NO: 5719 - RNA, 22 nt, Artificial Sequence
  Synthesized RNAi sequence
ugucugaacacucuccuuaauu

SEQ ID NO: 5720 - RNA, 22 nt, Artificial Sequence
  Synthesized RNAi sequence
ugucugcaauucauagcucuuu

SEQ ID NO: 5721 - RNA, 22 nt, Artificial Sequence
  Synthesized RNAi sequence
ugucuuugauuucgagcaacau

SEQ ID NO: 5722 - RNA, 22 nt, Artificial Sequence
  Synthesized RNAi sequence
ugugaacaucauagcaucaaug

SEQ ID NO: 5723 - RNA, 22 nt, Artificial Sequence
  Synthesized RNAi sequence
ugugaagguauuguuuguuacc

SEQ ID NO: 5724 - RNA, 22 nt, Artificial Sequence
  Synthesized RNAi sequence
ugugacaugcuggacaauaaau

SEQ ID NO: 5725 - RNA, 22 nt, Artificial Sequence
  Synthesized RNAi sequence
ugugggaaguguuucucccucu

SEQ ID NO: 5726 - RNA, 22 nt, Artificial Sequence
  Synthesized RNAi sequence
ugugucuuugauuucgagcaac

SEQ ID NO: 5727 - RNA, 22 nt, Artificial Sequence
  Synthesized RNAi sequence
uguuaacacuucugugggaagu

SEQ ID NO: 5728 - RNA, 22 nt, Artificial Sequence
  Synthesized RNAi sequence
uguuaccaucauauuaggugca

SEQ ID NO: 5729 - RNA, 22 nt, Artificial Sequence
  Synthesized RNAi sequence
uguuagcgcuagcacguggaac

SEQ ID NO: 5730 - RNA, 22 nt, Artificial Sequence
  Synthesized RNAi sequence
uguuaguagccaaaucagaugu

SEQ ID NO: 5731 - RNA, 22 nt, Artificial Sequence
  Synthesized RNAi sequence
uguuauagcggccuucuguaaa

SEQ ID NO: 5732 - RNA, 22 nt, Artificial Sequence
  Synthesized RNAi sequence
uguuauggcaaccaacauaaga

SEQ ID NO: 5733 - RNA, 22 nt, Artificial Sequence
  Synthesized RNAi sequence
uguucggacaaagugcaugaag

SEQ ID NO: 5734 - RNA, 22 nt, Artificial Sequence
  Synthesized RNAi sequence
uguucuaaugguuguaaaucac

SEQ ID NO: 5735 - RNA, 22 nt, Artificial Sequence
  Synthesized RNAi sequence
uguuggugcaccgccuuugagu

SEQ ID NO: 5736 - RNA, 22 nt, Artificial Sequence
  Synthesized RNAi sequence
uguuucaccuaaauucaaggcu

SEQ ID NO: 5737 - RNA, 22 nt, Artificial Sequence
  Synthesized RNAi sequence
uguuugaaugcuuuauaaucca

SEQ ID NO: 5738 - RNA, 22 nt, Artificial Sequence
  Synthesized RNAi sequence
uguuuguuaccaucauauuagg

SEQ ID NO: 5739 - RNA, 22 nt, Artificial Sequence
  Synthesized RNAi sequence
uuaaaauuaccacaggauucaa

SEQ ID NO: 5740 - RNA, 22 nt, Artificial Sequence
  Synthesized RNAi sequence
uuaaagaaugucugaacacucu

SEQ ID NO: 5741 - RNA, 22 nt, Artificial Sequence
  Synthesized RNAi sequence
uuaaagucaccaacaauauuga

SEQ ID NO: 5742 - RNA, 22 nt, Artificial Sequence
  Synthesized RNAi sequence
uuaacaaaaucgcccgucugcc

SEQ ID NO: 5743 - RNA, 22 nt, Artificial Sequence
  Synthesized RNAi sequence
uuaacaacagcauuuuggggua

SEQ ID NO: 5744 - RNA, 22 nt, Artificial Sequence
  Synthesized RNAi sequence
uuaacaauuucccaaccgucuc

SEQ ID NO: 5745 - RNA, 22 nt, Artificial Sequence
  Synthesized RNAi sequence
uuaacacacuuucuguacaauc

SEQ ID NO: 5746 - RNA, 22 nt, Artificial Sequence
  Synthesized RNAi sequence
uuaacacuucugugggaagugu

SEQ ID NO: 5747 - RNA, 22 nt, Artificial Sequence
  Synthesized RNAi sequence
uuaagaccuucggaaccuucuc

SEQ ID NO: 5748 - RNA, 22 nt, Artificial Sequence
  Synthesized RNAi sequence
uuaagggaaauacaaaauuugg

SEQ ID NO: 5749 - RNA, 22 nt, Artificial Sequence
  Synthesized RNAi sequence
uuaaguuuaaagucaccaacaa

SEQ ID NO: 5750 - RNA, 22 nt, Artificial Sequence
  Synthesized RNAi sequence
uuaaguuuagcuccaccaauaa

SEQ ID NO: 5751 - RNA, 22 nt, Artificial Sequence
  Synthesized RNAi sequence
uuaauacaaacugguguaccaa

SEQ ID NO: 5752 - RNA, 22 nt, Artificial Sequence
  Synthesized RNAi sequence
uuaaugcacucaagaggguagc

SEQ ID NO: 5753 - RNA, 22 nt, Artificial Sequence
  Synthesized RNAi sequence
uuaauuucaaaaggugucugca

SEQ ID NO: 5754 - RNA, 22 nt, Artificial Sequence
  Synthesized RNAi sequence
uuaauuuccuuugcacagguga

SEQ ID NO: 5755 - RNA, 22 nt, Artificial Sequence
  Synthesized RNAi sequence
uuacaaccuauguuagcgcuag

SEQ ID NO: 5756 - RNA, 22 nt, Artificial Sequence
  Synthesized RNAi sequence
uuacaacuagauuguuaguagc

SEQ ID NO: 5757 - RNA, 22 nt, Artificial Sequence
  Synthesized RNAi sequence
uuaccagcacgugcuagaaggu

SEQ ID NO: 5758 - RNA, 22 nt, Artificial Sequence
  Synthesized RNAi sequence
uuaccaucauauuaggugcaag

SEQ ID NO: 5759 - RNA, 22 nt, Artificial Sequence
  Synthesized RNAi sequence
uuacgaagaaugguuuucaagc

SEQ ID NO: 5760 - RNA, 22 nt, Artificial Sequence
  Synthesized RNAi sequence
uuagaggcaugaguaggccagu

SEQ ID NO: 5761 - RNA, 22 nt, Artificial Sequence
  Synthesized RNAi sequence
uuagccacugcgaagucaacug

SEQ ID NO: 5762 - RNA, 22 nt, Artificial Sequence
  Synthesized RNAi sequence
uuagcgcuagcacguggaaccc

SEQ ID NO: 5763 - RNA, 22 nt, Artificial Sequence
  Synthesized RNAi sequence
uuagcuccaccaauaaugauag

SEQ ID NO: 5764 - RNA, 22 nt, Artificial Sequence
  Synthesized RNAi sequence
uuaggugcaagggcacaguacu

SEQ ID NO: 5765 - RNA, 22 nt, Artificial Sequence
  Synthesized RNAi sequence
uuaguagccaaaucagauguga

SEQ ID NO: 5766 - RNA, 22 nt, Artificial Sequence
  Synthesized RNAi sequence
uuagucaaauucucagugccac

SEQ ID NO: 5767 - RNA, 22 nt, Artificial Sequence
  Synthesized RNAi sequence
uuagugucaauaaaguccaguu

SEQ ID NO: 5768 - RNA, 22 nt, Artificial Sequence
  Synthesized RNAi sequence
uuaguuagccacugcgaaguca

SEQ ID NO: 5769 - RNA, 22 nt, Artificial Sequence
  Synthesized RNAi sequence
uuauaauccaaaccuuucacag

SEQ ID NO: 5770 - RNA, 22 nt, Artificial Sequence
  Synthesized RNAi sequence
uuauagcggccuucuguaaaac

SEQ ID NO: 5771 - RNA, 22 nt, Artificial Sequence
  Synthesized RNAi sequence
uuauggcaaccaacauaagaga

SEQ ID NO: 5772 - RNA, 22 nt, Artificial Sequence
  Synthesized RNAi sequence
uuaugguauucggcaagacuau

SEQ ID NO: 5773 - RNA, 22 nt, Artificial Sequence
  Synthesized RNAi sequence
uucaaaaggugucugcaauuca

SEQ ID NO: 5774 - RNA, 22 nt, Artificial Sequence
  Synthesized RNAi sequence
uucaacaauuuguuugaaugcu

SEQ ID NO: 5775 - RNA, 22 nt, Artificial Sequence
  Synthesized RNAi sequence
uucaacagcuucacuaguaggu

SEQ ID NO: 5776 - RNA, 22 nt, Artificial Sequence
  Synthesized RNAi sequence
uucaagacaacuuccucuguua

SEQ ID NO: 5777 - RNA, 22 nt, Artificial Sequence
  Synthesized RNAi sequence
uucaagagugcgggagaaaauu

SEQ ID NO: 5778 - RNA, 22 nt, Artificial Sequence
  Synthesized RNAi sequence
uucaagccagauucauuauggu

SEQ ID NO: 5779 - RNA, 22 nt, Artificial Sequence
  Synthesized RNAi sequence
uucaaggcuuuaaguuuagcuc

SEQ ID NO: 5780 - RNA, 22 nt, Artificial Sequence
  Synthesized RNAi sequence
uucacaagcacagguugagaua

SEQ ID NO: 5781 - RNA, 22 nt, Artificial Sequence
  Synthesized RNAi sequence
uucacaguuuccacaaaagcac

SEQ ID NO: 5782 - RNA, 22 nt, Artificial Sequence
  Synthesized RNAi sequence
uucaccacaaugaucacacuuc

SEQ ID NO: 5783 - RNA, 22 nt, Artificial Sequence
  Synthesized RNAi sequence
uucaccuaaauucaaggcuuua

SEQ ID NO: 5784 - RNA, 22 nt, Artificial Sequence
  Synthesized RNAi sequence
uucacggcagcaguauacaccc

SEQ ID NO: 5785 - RNA, 22 nt, Artificial Sequence
  Synthesized RNAi sequence
uucacuaguagguuguucuaau

SEQ ID NO: 5786 - RNA, 22 nt, Artificial Sequence
  Synthesized RNAi sequence
uucaugagaguugaaaggcaca

SEQ ID NO: 5787 - RNA, 22 nt, Artificial Sequence
  Synthesized RNAi sequence
uucaugcucauguucacggcag

SEQ ID NO: 5788 - RNA, 22 nt, Artificial Sequence
  Synthesized RNAi sequence
uucauuaaguuuaaagucacca

SEQ ID NO: 5789 - RNA, 22 nt, Artificial Sequence
  Synthesized RNAi sequence
uucauuaugguauucggcaaga

SEQ ID NO: 5790 - RNA, 22 nt, Artificial Sequence
  Synthesized RNAi sequence
uucauuuggugacgcaacugga

SEQ ID NO: 5791 - RNA, 22 nt, Artificial Sequence
  Synthesized RNAi sequence
uucccaaccgucucuaagaaac

SEQ ID NO: 5792 - RNA, 22 nt, Artificial Sequence
  Synthesized RNAi sequence
uuccccauugaaggugucaaau

SEQ ID NO: 5793 - RNA, 22 nt, Artificial Sequence
  Synthesized RNAi sequence
uuccguguaccaagcaauuuca

SEQ ID NO: 5794 - RNA, 22 nt, Artificial Sequence
  Synthesized RNAi sequence
uuccucuguuaacacuucugug

SEQ ID NO: 5795 - RNA, 22 nt, Artificial Sequence
  Synthesized RNAi sequence
uuccuuugcacaggugacaauu

SEQ ID NO: 5796 - RNA, 22 nt, Artificial Sequence
  Synthesized RNAi sequence
uucgagcaacauaagcccguua

SEQ ID NO: 5797 - RNA, 22 nt, Artificial Sequence
  Synthesized RNAi sequence
uucgcaaguggcuuuaacaaaa

SEQ ID NO: 5798 - RNA, 22 nt, Artificial Sequence
  Synthesized RNAi sequence
uucggaaccuucuccaacaaca

SEQ ID NO: 5799 - RNA, 22 nt, Artificial Sequence
  Synthesized RNAi sequence
uucggacaaagugcaugaagcu

SEQ ID NO: 5800 - RNA, 22 nt, Artificial Sequence
  Synthesized RNAi sequence
uucggcaagacuaugcucaggu

SEQ ID NO: 5801 - RNA, 22 nt, Artificial Sequence
  Synthesized RNAi sequence
uucuaaugguuguaaaucacca

SEQ ID NO: 5802 - RNA, 22 nt, Artificial Sequence
  Synthesized RNAi sequence
uucucagugccacaaaauucgc

SEQ ID NO: 5803 - RNA, 22 nt, Artificial Sequence
  Synthesized RNAi sequence
uucuccaacaacaccuguaugg

SEQ ID NO: 5804 - RNA, 22 nt, Artificial Sequence
  Synthesized RNAi sequence
uucucccucuaagaagauaauu

SEQ ID NO: 5805 - RNA, 22 nt, Artificial Sequence
  Synthesized RNAi sequence
uucucuggauuuaacacacuuu

SEQ ID NO: 5806 - RNA, 22 nt, Artificial Sequence
  Synthesized RNAi sequence
uucucuucaagccaaucaagga

SEQ ID NO: 5807 - RNA, 22 nt, Artificial Sequence
  Synthesized RNAi sequence
uucugaauugugacaugcugga

SEQ ID NO: 5808 - RNA, 22 nt, Artificial Sequence
  Synthesized RNAi sequence
uucuguaaaacacgcacagaau

SEQ ID NO: 5809 - RNA, 22 nt, Artificial Sequence
  Synthesized RNAi sequence
uucuguacaaucccuuugagug

SEQ ID NO: 5810 - RNA, 22 nt, Artificial Sequence
  Synthesized RNAi sequence
uucugugucuuugauuucgagc

SEQ ID NO: 5811 - RNA, 22 nt, Artificial Sequence
  Synthesized RNAi sequence
uucuucucuggauuuaacacac

SEQ ID NO: 5812 - RNA, 22 nt, Artificial Sequence
  Synthesized RNAi sequence
uucuuuagucaaauucucagug

SEQ ID NO: 5813 - RNA, 22 nt, Artificial Sequence
  Synthesized RNAi sequence
uucuuugccaauuuaauuucaa

SEQ ID NO: 5814 - RNA, 22 nt, Artificial Sequence
  Synthesized RNAi sequence
uucuuuuggggcuuuuagaggc

SEQ ID NO: 5815 - RNA, 22 nt, Artificial Sequence
  Synthesized RNAi sequence
uugaaaggcacauuugguugca

SEQ ID NO: 5816 - RNA, 22 nt, Artificial Sequence
  Synthesized RNAi sequence
uugaaggugucaaauuucuuug

SEQ ID NO: 5817 - RNA, 22 nt, Artificial Sequence
  Synthesized RNAi sequence
uugaaugcuuuauaauccaaac

SEQ ID NO: 5818 - RNA, 22 nt, Artificial Sequence
  Synthesized RNAi sequence
uugagauaaauuuaacaauuuc

SEQ ID NO: 5819 - RNA, 22 nt, Artificial Sequence
  Synthesized RNAi sequence
uugagcaguuucaagagugcgg

SEQ ID NO: 5820 - RNA, 22 nt, Artificial Sequence
  Synthesized RNAi sequence
uugagugcgugacaaauguuuc

SEQ ID NO: 5821 - RNA, 22 nt, Artificial Sequence
  Synthesized RNAi sequence
uugagugugaagguauuguuug

SEQ ID NO: 5822 - RNA, 22 nt, Artificial Sequence
  Synthesized RNAi sequence
uugaucguacaacacgagcagc

SEQ ID NO: 5823 - RNA, 22 nt, Artificial Sequence
  Synthesized RNAi sequence
uugauuauggaauuuaagggaa

SEQ ID NO: 5824 - RNA, 22 nt, Artificial Sequence
  Synthesized RNAi sequence
uugauuucgagcaacauaagcc

SEQ ID NO: 5825 - RNA, 22 nt, Artificial Sequence
  Synthesized RNAi sequence
uugcacaggugacaauuugucc

SEQ ID NO: 5826 - RNA, 22 nt, Artificial Sequence
  Synthesized RNAi sequence
uugcauucauuuggugacgcaa

SEQ ID NO: 5827 - RNA, 22 nt, Artificial Sequence
  Synthesized RNAi sequence
uugccaauuuaauuucaaaagg

SEQ ID NO: 5828 - RNA, 22 nt, Artificial Sequence
  Synthesized RNAi sequence
uuggggcuuuuagaggcaugag

SEQ ID NO: 5829 - RNA, 22 nt, Artificial Sequence
  Synthesized RNAi sequence
uugggguaaguaaccacaagua

SEQ ID NO: 5830 - RNA, 22 nt, Artificial Sequence
  Synthesized RNAi sequence
uuggugcaccgccuuugagugu

SEQ ID NO: 5831 - RNA, 22 nt, Artificial Sequence
  Synthesized RNAi sequence
uugguugaauagucuugauuau

SEQ ID NO: 5832 - RNA, 22 nt, Artificial Sequence
  Synthesized RNAi sequence
uugguugcauucauuuggugac

SEQ ID NO: 5833 - RNA, 22 nt, Artificial Sequence
  Synthesized RNAi sequence
uuguaaaucaccaguuuucaag

SEQ ID NO: 5834 - RNA, 22 nt, Artificial Sequence
  Synthesized RNAi sequence
uuguaacuuuaaaauuaccaca

SEQ ID NO: 5835 - RNA, 22 nt, Artificial Sequence
  Synthesized RNAi sequence
uugucauuaagaccuucggaac

SEQ ID NO: 5836 - RNA, 22 nt, Artificial Sequence
  Synthesized RNAi sequence
uuguccaccgacaauuucacaa

SEQ ID NO: 5837 - RNA, 22 nt, Artificial Sequence
  Synthesized RNAi sequence
uugugacaugcuggacaauaaa

SEQ ID NO: 5838 - RNA, 22 nt, Artificial Sequence
  Synthesized RNAi sequence
uuguuaccaucauauuaggugc

SEQ ID NO: 5839 - RNA, 22 nt, Artificial Sequence
  Synthesized RNAi sequence
uuguuaguagccaaaucagaug

SEQ ID NO: 5840 - RNA, 22 nt, Artificial Sequence
  Synthesized RNAi sequence
uuguuauggcaaccaacauaag

SEQ ID NO: 5841 - RNA, 22 nt, Artificial Sequence
  Synthesized RNAi sequence
uuguucggacaaagugcaugaa

SEQ ID NO: 5842 - RNA, 22 nt, Artificial Sequence
  Synthesized RNAi sequence
uuguucuaaugguuguaaauca

SEQ ID NO: 5843 - RNA, 22 nt, Artificial Sequence
  Synthesized RNAi sequence
uuguuggugcaccgccuuugag

SEQ ID NO: 5844 - RNA, 22 nt, Artificial Sequence
  Synthesized RNAi sequence
uuguuugaaugcuuuauaaucc

SEQ ID NO: 5845 - RNA, 22 nt, Artificial Sequence
  Synthesized RNAi sequence
uuguuuguuaccaucauauuag

SEQ ID NO: 5846 - RNA, 22 nt, Artificial Sequence
  Synthesized RNAi sequence
uuuaaaauuaccacaggauuca

SEQ ID NO: 5847 - RNA, 22 nt, Artificial Sequence
  Synthesized RNAi sequence
uuuaaagucaccaacaauauug

SEQ ID NO: 5848 - RNA, 22 nt, Artificial Sequence
  Synthesized RNAi sequence
uuuaacaauuucccaaccgucu

SEQ ID NO: 5849 - RNA, 22 nt, Artificial Sequence
  Synthesized RNAi sequence
uuuaagggaaauacaaaauuug

SEQ ID NO: 5850 - RNA, 22 nt, Artificial Sequence
  Synthesized RNAi sequence
uuuaaguuuagcuccaccaaua

SEQ ID NO: 5851 - RNA, 22 nt, Artificial Sequence
  Synthesized RNAi sequence
uuuaaugcacucaagaggguag

SEQ ID NO: 5852 - RNA, 22 nt, Artificial Sequence
  Synthesized RNAi sequence
uuuaccagcacgugcuagaagg

SEQ ID NO: 5853 - RNA, 22 nt, Artificial Sequence
  Synthesized RNAi sequence
uuuagaggcaugaguaggccag

SEQ ID NO: 5854 - RNA, 22 nt, Artificial Sequence
  Synthesized RNAi sequence
uuuagucaaauucucagugcca

SEQ ID NO: 5855 - RNA, 22 nt, Artificial Sequence
  Synthesized RNAi sequence
uuuauaauccaaaccuuucaca

SEQ ID NO: 5856 - RNA, 22 nt, Artificial Sequence
  Synthesized RNAi sequence
uuucaaaaggugucugcaauuc

SEQ ID NO: 5857 - RNA, 22 nt, Artificial Sequence
  Synthesized RNAi sequence
uuucaagacaacuuccucuguu

SEQ ID NO: 5858 - RNA, 22 nt, Artificial Sequence
  Synthesized RNAi sequence
uuucaagagugcgggagaaaau

SEQ ID NO: 5859 - RNA, 22 nt, Artificial Sequence
  Synthesized RNAi sequence
uuucaagccagauucauuaugg

SEQ ID NO: 5860 - RNA, 22 nt, Artificial Sequence
  Synthesized RNAi sequence
uuucacaagcacagguugagau

SEQ ID NO: 5861 - RNA, 22 nt, Artificial Sequence
  Synthesized RNAi sequence
uuucacaguuuccacaaaagca

SEQ ID NO: 5862 - RNA, 22 nt, Artificial Sequence
  Synthesized RNAi sequence
uuucaccacaaugaucacacuu

SEQ ID NO: 5863 - RNA, 22 nt, Artificial Sequence
  Synthesized RNAi sequence
uuucaccuaaauucaaggcuuu

SEQ ID NO: 5864 - RNA, 22 nt, Artificial Sequence
  Synthesized RNAi sequence
uuucagaacguuccguguacca

SEQ ID NO: 5865 - RNA, 22 nt, Artificial Sequence
  Synthesized RNAi sequence
uuucaugcucauguucacggca

SEQ ID NO: 5866 - RNA, 22 nt, Artificial Sequence
  Synthesized RNAi sequence
uuucccaaccgucucuaagaaa

SEQ ID NO: 5867 - RNA, 22 nt, Artificial Sequence
  Synthesized RNAi sequence
uuucgagcaacauaagcccguu

SEQ ID NO: 5868 - RNA, 22 nt, Artificial Sequence
  Synthesized RNAi sequence
uuucucccucuaagaagauaau

SEQ ID NO: 5869 - RNA, 22 nt, Artificial Sequence
  Synthesized RNAi sequence
uuucuguacaaucccuuugagu

SEQ ID NO: 5870 - RNA, 22 nt, Artificial Sequence
  Synthesized RNAi sequence
uuucugugucuuugauuucgag

SEQ ID NO: 5871 - RNA, 22 nt, Artificial Sequence
  Synthesized RNAi sequence
uuucuucucuggauuuaacaca

SEQ ID NO: 5872 - RNA, 22 nt, Artificial Sequence
  Synthesized RNAi sequence
uuucuuugccaauuuaauuuca

SEQ ID NO: 5873 - RNA, 22 nt, Artificial Sequence
  Synthesized RNAi sequence
uuucuuuuggggcuuuuagagg

SEQ ID NO: 5874 - RNA, 22 nt, Artificial Sequence
  Synthesized RNAi sequence
uuugaaugcuuuauaauccaaa

SEQ ID NO: 5875 - RNA, 22 nt, Artificial Sequence
  Synthesized RNAi sequence
uuugagcaguuucaagagugcg

SEQ ID NO: 5876 - RNA, 22 nt, Artificial Sequence
  Synthesized RNAi sequence
uuugagugcgugacaaauguuu

SEQ ID NO: 5877 - RNA, 22 nt, Artificial Sequence
  Synthesized RNAi sequence
uuugagugugaagguauuguuu

SEQ ID NO: 5878 - RNA, 22 nt, Artificial Sequence
  Synthesized RNAi sequence
uuugauuucgagcaacauaagc

SEQ ID NO: 5879 - RNA, 22 nt, Artificial Sequence
  Synthesized RNAi sequence
uuugcacaggugacaauuuguc

SEQ ID NO: 5880 - RNA, 22 nt, Artificial Sequence
  Synthesized RNAi sequence
uuugccaauuuaauuucaaaag

SEQ ID NO: 5881 - RNA, 22 nt, Artificial Sequence
  Synthesized RNAi sequence
uuuggacauuccccauugaagg

SEQ ID NO: 5882 - RNA, 22 nt, Artificial Sequence
  Synthesized RNAi sequence
uuuggggcuuuuagaggcauga

SEQ ID NO: 5883 - RNA, 22 nt, Artificial Sequence
  Synthesized RNAi sequence
uuugggguaaguaaccacaagu

SEQ ID NO: 5884 - RNA, 22 nt, Artificial Sequence
  Synthesized RNAi sequence
uuuguaacuuuaaaauuaccac

SEQ ID NO: 5885 - RNA, 22 nt, Artificial Sequence
  Synthesized RNAi sequence
uuuguccaccgacaauuucaca

SEQ ID NO: 5886 - RNA, 22 nt, Artificial Sequence
  Synthesized RNAi sequence
uuuguuaccaucauauuaggug

SEQ ID NO: 5887 - RNA, 22 nt, Artificial Sequence
  Synthesized RNAi sequence
uuuguuggugcaccgccuuuga

SEQ ID NO: 5888 - RNA, 22 nt, Artificial Sequence
  Synthesized RNAi sequence
uuuguuugaaugcuuuauaauc

SEQ ID NO: 5889 - RNA, 22 nt, Artificial Sequence
  Synthesized RNAi sequence
uuuuaacaacagcauuuugggg

SEQ ID NO: 5890 - RNA, 22 nt, Artificial Sequence
  Synthesized RNAi sequence
uuuuagaggcaugaguaggcca

SEQ ID NO: 5891 - RNA, 22 nt, Artificial Sequence
  Synthesized RNAi sequence
uuuucaagacaacuuccucugu

SEQ ID NO: 5892 - RNA, 22 nt, Artificial Sequence
  Synthesized RNAi sequence
uuuucagaacguuccguguacc

SEQ ID NO: 5893 - RNA, 22 nt, Artificial Sequence
  Synthesized RNAi sequence
uuuucugugucuuugauuucga

SEQ ID NO: 5894 - RNA, 22 nt, Artificial Sequence
  Synthesized RNAi sequence
uuuugagcaguuucaagagugc

SEQ ID NO: 5895 - RNA, 22 nt, Artificial Sequence
  Synthesized RNAi sequence
uuuuggggcuuuuagaggcaug

SEQ ID NO: 5896 - RNA, 22 nt, Artificial Sequence
  Synthesized RNAi sequence
uuuugggguaaguaaccacaag

SEQ ID NO: 5897 - RNA, 22 nt, Artificial Sequence
  Synthesized RNAi sequence
aaacaacaccauccaauuuaua

SEQ ID NO: 5898 - RNA, 22 nt, Artificial Sequence
  Synthesized RNAi sequence
aaacaaguaacucauuguuucu

SEQ ID NO: 5899 - RNA, 22 nt, Artificial Sequence
  Synthesized RNAi sequence
aaacacaacuaccacccacuuu

SEQ ID NO: 5900 - RNA, 22 nt, Artificial Sequence
  Synthesized RNAi sequence
aaacaccguguaacuauguuag

SEQ ID NO: 5901 - RNA, 22 nt, Artificial Sequence
  Synthesized RNAi sequence
aaacaccuaaagcagcgguuga

SEQ ID NO: 5902 - RNA, 22 nt, Artificial Sequence
  Synthesized RNAi sequence
aaacaccuuaauaguccucacu

SEQ ID NO: 5903 - RNA, 22 nt, Artificial Sequence
  Synthesized RNAi sequence
aaacacgguuuaaacaccgugu

SEQ ID NO: 5904 - RNA, 22 nt, Artificial Sequence
  Synthesized RNAi sequence
aaacacuacaagguauagaacc

SEQ ID NO: 5905 - RNA, 22 nt, Artificial Sequence
  Synthesized RNAi sequence
aaacagaaacuguagcuggcac

SEQ ID NO: 5906 - RNA, 22 nt, Artificial Sequence
  Synthesized RNAi sequence
aaacagacgcugauuuugcaga

SEQ ID NO: 5907 - RNA, 22 nt, Artificial Sequence
  Synthesized RNAi sequence
aaacaguuccaagaauuucuug

SEQ ID NO: 5908 - RNA, 22 nt, Artificial Sequence
  Synthesized RNAi sequence
aaacauccguaauaggaccuuu

SEQ ID NO: 5909 - RNA, 22 nt, Artificial Sequence
  Synthesized RNAi sequence
aaacauuggcugcauuaacaac

SEQ ID NO: 5910 - RNA, 22 nt, Artificial Sequence
  Synthesized RNAi sequence
aaacauuuuaacugcaacuucc

SEQ ID NO: 5911 - RNA, 22 nt, Artificial Sequence
  Synthesized RNAi sequence
aaaccacuaagacaaacacuac

SEQ ID NO: 5912 - RNA, 22 nt, Artificial Sequence
  Synthesized RNAi sequence
aaaccaugaguagcaaggguuu

SEQ ID NO: 5913 - RNA, 22 nt, Artificial Sequence
  Synthesized RNAi sequence
aaacccugacccggguaagugg

SEQ ID NO: 5914 - RNA, 22 nt, Artificial Sequence
  Synthesized RNAi sequence
aaacccuugccgagcugcugaa

SEQ ID NO: 5915 - RNA, 22 nt, Artificial Sequence
  Synthesized RNAi sequence
aaaccuaauacucuagauaauu

SEQ ID NO: 5916 - RNA, 22 nt, Artificial Sequence
  Synthesized RNAi sequence
aaacgaauuugauguuucaacu

SEQ ID NO: 5917 - RNA, 22 nt, Artificial Sequence
  Synthesized RNAi sequence
aaacguauuaacguaagcauca

SEQ ID NO: 5918 - RNA, 22 nt, Artificial Sequence
  Synthesized RNAi sequence
aaacuaggaucaguuguguggu

SEQ ID NO: 5919 - RNA, 22 nt, Artificial Sequence
  Synthesized RNAi sequence
aaacuauggcuuuaguuuccac

SEQ ID NO: 5920 - RNA, 22 nt, Artificial Sequence
  Synthesized RNAi sequence
aaacuauucacuucaauagucu

SEQ ID NO: 5921 - RNA, 22 nt, Artificial Sequence
  Synthesized RNAi sequence
aaacucaccagacucaucaaau

SEQ ID NO: 5922 - RNA, 22 nt, Artificial Sequence
  Synthesized RNAi sequence
aaacuguagcuggcacuuugag

SEQ ID NO: 5923 - RNA, 22 nt, Artificial Sequence
  Synthesized RNAi sequence
aaacuguagugacaagucucuc

SEQ ID NO: 5924 - RNA, 22 nt, Artificial Sequence
  Synthesized RNAi sequence
aaacuguuguccauaugucauu

SEQ ID NO: 5925 - RNA, 22 nt, Artificial Sequence
  Synthesized RNAi sequence
aaacuuaaaauuaucgaagcuu

SEQ ID NO: 5926 - RNA, 22 nt, Artificial Sequence
  Synthesized RNAi sequence
aaacuucaacucuauuuguugg

SEQ ID NO: 5927 - RNA, 22 nt, Artificial Sequence
  Synthesized RNAi sequence
aaagaaauaaggcauauaauua

SEQ ID NO: 5928 - RNA, 22 nt, Artificial Sequence
  Synthesized RNAi sequence
aaagaagauguacauucuaacc

SEQ ID NO: 5929 - RNA, 22 nt, Artificial Sequence
  Synthesized RNAi sequence
aaagaaggauaggugucuaaag

SEQ ID NO: 5930 - RNA, 22 nt, Artificial Sequence
  Synthesized RNAi sequence
aaagaagugucuuaagauuguc

SEQ ID NO: 5931 - RNA, 22 nt, Artificial Sequence
  Synthesized RNAi sequence
aaagaaucuaaaccacuaagac

SEQ ID NO: 5932 - RNA, 22 nt, Artificial Sequence
  Synthesized RNAi sequence
aaagacaacguauacaccaggu

SEQ ID NO: 5933 - RNA, 22 nt, Artificial Sequence
  Synthesized RNAi sequence
aaagaggguguguaguguuuau

SEQ ID NO: 5934 - RNA, 22 nt, Artificial Sequence
  Synthesized RNAi sequence
aaagaugaaaugguaauuugua

SEQ ID NO: 5935 - RNA, 22 nt, Artificial Sequence
  Synthesized RNAi sequence
aaagauggauggaaccauucuu

SEQ ID NO: 5936 - RNA, 22 nt, Artificial Sequence
  Synthesized RNAi sequence
aaagcaccgucuaugcaauaca

SEQ ID NO: 5937 - RNA, 22 nt, Artificial Sequence
  Synthesized RNAi sequence
aaagcagcgguugaguagauua

SEQ ID NO: 5938 - RNA, 22 nt, Artificial Sequence
  Synthesized RNAi sequence
aaagccucaacacguagagugu

SEQ ID NO: 5939 - RNA, 22 nt, Artificial Sequence
  Synthesized RNAi sequence
aaagccuuuaccuccauuagca

SEQ ID NO: 5940 - RNA, 22 nt, Artificial Sequence
  Synthesized RNAi sequence
aaagcuuucgcuagcauuucag

SEQ ID NO: 5941 - RNA, 22 nt, Artificial Sequence
  Synthesized RNAi sequence
aaaggaccuucuaacaccauua

SEQ ID NO: 5942 - RNA, 22 nt, Artificial Sequence
  Synthesized RNAi sequence
aaaggcuuagcauaauuagcua

SEQ ID NO: 5943 - RNA, 22 nt, Artificial Sequence
  Synthesized RNAi sequence
aaaggugacuccuguuguacua

SEQ ID NO: 5944 - RNA, 22 nt, Artificial Sequence
  Synthesized RNAi sequence
aaaggugauaacuucaccaucu

SEQ ID NO: 5945 - RNA, 22 nt, Artificial Sequence
  Synthesized RNAi sequence
aaaguaaaaucuagcaccauaa

SEQ ID NO: 5946 - RNA, 22 nt, Artificial Sequence
  Synthesized RNAi sequence
aaaguaaagauggauggaacca

SEQ ID NO: 5947 - RNA, 22 nt, Artificial Sequence
  Synthesized RNAi sequence
aaaguaacaaguuuucugugag

SEQ ID NO: 5948 - RNA, 22 nt, Artificial Sequence
  Synthesized RNAi sequence
aaaguagauaagacauugucua

SEQ ID NO: 5949 - RNA, 22 nt, Artificial Sequence
  Synthesized RNAi sequence
aaagugauauucacacucuugu

SEQ ID NO: 5950 - RNA, 22 nt, Artificial Sequence
  Synthesized RNAi sequence
aaagugaugucaaugucacuaa

SEQ ID NO: 5951 - RNA, 22 nt, Artificial Sequence
  Synthesized RNAi sequence
aaagugugcccauguacauaac

SEQ ID NO: 5952 - RNA, 22 nt, Artificial Sequence
  Synthesized RNAi sequence
aaaguuagcagcuucaccagcc

SEQ ID NO: 5953 - RNA, 22 nt, Artificial Sequence
  Synthesized RNAi sequence
aaaguugaugaaaacguauuaa

SEQ ID NO: 5954 - RNA, 22 nt, Artificial Sequence
  Synthesized RNAi sequence
aaaguuucuuuagaaguuauau

SEQ ID NO: 5955 - RNA, 22 nt, Artificial Sequence
  Synthesized RNAi sequence
aaauaaccacuaaaacuauuca

SEQ ID NO: 5956 - RNA, 22 nt, Artificial Sequence
  Synthesized RNAi sequence
aaauaagaauugucuuucuuau

SEQ ID NO: 5957 - RNA, 22 nt, Artificial Sequence
  Synthesized RNAi sequence
aaauaaggcauauaauuaguac

SEQ ID NO: 5958 - RNA, 22 nt, Artificial Sequence
  Synthesized RNAi sequence
aaauaaguaguauguagccaua

SEQ ID NO: 5959 - RNA, 22 nt, Artificial Sequence
  Synthesized RNAi sequence
aaauaaguuggaccaaacuguu

SEQ ID NO: 5960 - RNA, 22 nt, Artificial Sequence
  Synthesized RNAi sequence
aaauaauuaaaugaagccucua

SEQ ID NO: 5961 - RNA, 22 nt, Artificial Sequence
  Synthesized RNAi sequence
aaaucaaugcccagugguguaa

SEQ ID NO: 5962 - RNA, 22 nt, Artificial Sequence
  Synthesized RNAi sequence
aaaucaucagcaaauuugauau

SEQ ID NO: 5963 - RNA, 22 nt, Artificial Sequence
  Synthesized RNAi sequence
aaaucggggccauuuguacaag

SEQ ID NO: 5964 - RNA, 22 nt, Artificial Sequence
  Synthesized RNAi sequence
aaaucuagcaccauaaucaacc

SEQ ID NO: 5965 - RNA, 22 nt, Artificial Sequence
  Synthesized RNAi sequence
aaaucuuuaacguuccauauca

SEQ ID NO: 5966 - RNA, 22 nt, Artificial Sequence
  Synthesized RNAi sequence
aaaugaagccucuagacaaaau

SEQ ID NO: 5967 - RNA, 22 nt, Artificial Sequence
  Synthesized RNAi sequence
aaaugagagagagaaugucuuu

SEQ ID NO: 5968 - RNA, 22 nt, Artificial Sequence
  Synthesized RNAi sequence
aaaugaugcaaagaagauguac

SEQ ID NO: 5969 - RNA, 22 nt, Artificial Sequence
  Synthesized RNAi sequence
aaauggcuuaacuuccucuuua

SEQ ID NO: 5970 - RNA, 22 nt, Artificial Sequence
  Synthesized RNAi sequence
aaauguaccaugcuuaaguuca

SEQ ID NO: 5971 - RNA, 22 nt, Artificial Sequence
  Synthesized RNAi sequence
aaauguacuaccagcacagaau

SEQ ID NO: 5972 - RNA, 22 nt, Artificial Sequence
  Synthesized RNAi sequence
aaauguucuucagguguuuuag

SEQ ID NO: 5973 - RNA, 22 nt, Artificial Sequence
  Synthesized RNAi sequence
aaauguuuuaccuucaugugaa

SEQ ID NO: 5974 - RNA, 22 nt, Artificial Sequence
  Synthesized RNAi sequence
aaauuagacauuaaaacaccua

SEQ ID NO: 5975 - RNA, 22 nt, Artificial Sequence
  Synthesized RNAi sequence
aaauuaucgaagcuugcguuug

SEQ ID NO: 5976 - RNA, 22 nt, Artificial Sequence
  Synthesized RNAi sequence
aaauuccaaagguuuaccuugg

SEQ ID NO: 5977 - RNA, 22 nt, Artificial Sequence
  Synthesized RNAi sequence
aaauuccaagaaacaguuccaa

SEQ ID NO: 5978 - RNA, 22 nt, Artificial Sequence
  Synthesized RNAi sequence
aaauucuauaccuaguugugua

SEQ ID NO: 5979 - RNA, 22 nt, Artificial Sequence
  Synthesized RNAi sequence
aaauuggcauguugaaacaagu

SEQ ID NO: 5980 - RNA, 22 nt, Artificial Sequence
  Synthesized RNAi sequence
aaauuguucauaagaaagugug

SEQ ID NO: 5981 - RNA, 22 nt, Artificial Sequence
  Synthesized RNAi sequence
aaauuuaagccauguguuacau

SEQ ID NO: 5982 - RNA, 22 nt, Artificial Sequence
  Synthesized RNAi sequence
aaauuuaccgacacucuuaaca

SEQ ID NO: 5983 - RNA, 22 nt, Artificial Sequence
  Synthesized RNAi sequence
aaauuugauauuaucacauaca

SEQ ID NO: 5984 - RNA, 22 nt, Artificial Sequence
  Synthesized RNAi sequence
aaauuuucauaagcacucuuaa

SEQ ID NO: 5985 - RNA, 22 nt, Artificial Sequence
  Synthesized RNAi sequence
aacaaacccuugccgagcugcu

SEQ ID NO: 5986 - RNA, 22 nt, Artificial Sequence
  Synthesized RNAi sequence
aacaacaccauccaauuuauaa

SEQ ID NO: 5987 - RNA, 22 nt, Artificial Sequence
  Synthesized RNAi sequence
aacaacaucacccacuauauau

SEQ ID NO: 5988 - RNA, 22 nt, Artificial Sequence
  Synthesized RNAi sequence
aacaacaucuuuaguuucuaca

SEQ ID NO: 5989 - RNA, 22 nt, Artificial Sequence
  Synthesized RNAi sequence
aacaacugguguaaguuccauc

SEQ ID NO: 5990 - RNA, 22 nt, Artificial Sequence
  Synthesized RNAi sequence
aacaacuugucuaguaguugca

SEQ ID NO: 5991 - RNA, 22 nt, Artificial Sequence
  Synthesized RNAi sequence
aacaacuuuguuaagaaaaggc

SEQ ID NO: 5992 - RNA, 22 nt, Artificial Sequence
  Synthesized RNAi sequence
aacaagaguggcagaaucugga

SEQ ID NO: 5993 - RNA, 22 nt, Artificial Sequence
  Synthesized RNAi sequence
aacaagaguuucauuuagaucg

SEQ ID NO: 5994 - RNA, 22 nt, Artificial Sequence
  Synthesized RNAi sequence
aacaaguuuucugugaggaacu

SEQ ID NO: 5995 - RNA, 22 nt, Artificial Sequence
  Synthesized RNAi sequence
aacaauacauaugugaagccaa

SEQ ID NO: 5996 - RNA, 22 nt, Artificial Sequence
  Synthesized RNAi sequence
aacaauaguuguacauucgacu

SEQ ID NO: 5997 - RNA, 22 nt, Artificial Sequence
  Synthesized RNAi sequence
aacaaugcaguggcaagauaac

SEQ ID NO: 5998 - RNA, 22 nt, Artificial Sequence
  Synthesized RNAi sequence
aacaauuuagcuccuuucuuaa

SEQ ID NO: 5999 - RNA, 22 nt, Artificial Sequence
  Synthesized RNAi sequence
aacacaacuaccacccacuuua

SEQ ID NO: 6000 - RNA, 22 nt, Artificial Sequence
  Synthesized RNAi sequence
aacacaagcuuugauuuucuua

SEQ ID NO: 6001 - RNA, 22 nt, Artificial Sequence
  Synthesized RNAi sequence
aacacaggcgaacucauuuacu

SEQ ID NO: 6002 - RNA, 22 nt, Artificial Sequence
  Synthesized RNAi sequence
aacacaucauacaaguugauga

SEQ ID NO: 6003 - RNA, 22 nt, Artificial Sequence
  Synthesized RNAi sequence
aacaccauccaauuuauaagua

SEQ ID NO: 6004 - RNA, 22 nt, Artificial Sequence
  Synthesized RNAi sequence
aacaccauuaacaauaguugua

SEQ ID NO: 6005 - RNA, 22 nt, Artificial Sequence
  Synthesized RNAi sequence
aacacccucuugaacaacauca

SEQ ID NO: 6006 - RNA, 22 nt, Artificial Sequence
  Synthesized RNAi sequence
aacaccguguaacuauguuagu

SEQ ID NO: 6007 - RNA, 22 nt, Artificial Sequence
  Synthesized RNAi sequence
aacaccuaaagcagcgguugag

SEQ ID NO: 6008 - RNA, 22 nt, Artificial Sequence
  Synthesized RNAi sequence
aacaccuccuccauguuuaagg

SEQ ID NO: 6009 - RNA, 22 nt, Artificial Sequence
  Synthesized RNAi sequence
aacaccuuaauaguccucacuu

SEQ ID NO: 6010 - RNA, 22 nt, Artificial Sequence
  Synthesized RNAi sequence
aacaccuuucuuaaauuguuca

SEQ ID NO: 6011 - RNA, 22 nt, Artificial Sequence
  Synthesized RNAi sequence
aacacgguuuaaacaccgugua

SEQ ID NO: 6012 - RNA, 22 nt, Artificial Sequence
  Synthesized RNAi sequence
aacacuacaagguauagaacca

SEQ ID NO: 6013 - RNA, 22 nt, Artificial Sequence
  Synthesized RNAi sequence
aacacuaucaacgauguaagaa

SEQ ID NO: 6014 - RNA, 22 nt, Artificial Sequence
  Synthesized RNAi sequence
aacagaaacuguagcuggcacu

SEQ ID NO: 6015 - RNA, 22 nt, Artificial Sequence
  Synthesized RNAi sequence
aacagacgcugauuuugcagau

SEQ ID NO: 6016 - RNA, 22 nt, Artificial Sequence
  Synthesized RNAi sequence
aacagcagcuaaaccaugagua

SEQ ID NO: 6017 - RNA, 22 nt, Artificial Sequence
  Synthesized RNAi sequence
aacagcaucaggugaagaaaca

SEQ ID NO: 6018 - RNA, 22 nt, Artificial Sequence
  Synthesized RNAi sequence
aacagcuucuacacccuuaagg

SEQ ID NO: 6019 - RNA, 22 nt, Artificial Sequence
  Synthesized RNAi sequence
aacaguauagguugacacauaa

SEQ ID NO: 6020 - RNA, 22 nt, Artificial Sequence
  Synthesized RNAi sequence
aacaguaucuacacaaacucuu

SEQ ID NO: 6021 - RNA, 22 nt, Artificial Sequence
  Synthesized RNAi sequence
aacaguauucuuugcuauagua

SEQ ID NO: 6022 - RNA, 22 nt, Artificial Sequence
  Synthesized RNAi sequence
aacaguuccaagaauuucuugc

SEQ ID NO: 6023 - RNA, 22 nt, Artificial Sequence
  Synthesized RNAi sequence
aacaguuguuaucugcccauuu

SEQ ID NO: 6024 - RNA, 22 nt, Artificial Sequence
  Synthesized RNAi sequence
aacaguuuguugacuaucauca

SEQ ID NO: 6025 - RNA, 22 nt, Artificial Sequence
  Synthesized RNAi sequence
aacauaaaauguuuuaccuuca

SEQ ID NO: 6026 - RNA, 22 nt, Artificial Sequence
  Synthesized RNAi sequence
aacaucacccacuauauaugga

SEQ ID NO: 6027 - RNA, 22 nt, Artificial Sequence
  Synthesized RNAi sequence
aacaucaccuaacucaccuacu

SEQ ID NO: 6028 - RNA, 22 nt, Artificial Sequence
  Synthesized RNAi sequence
aacaucagacacuaaugccuga

SEQ ID NO: 6029 - RNA, 22 nt, Artificial Sequence
  Synthesized RNAi sequence
aacaucagcuccauccaaauaa

SEQ ID NO: 6030 - RNA, 22 nt, Artificial Sequence
  Synthesized RNAi sequence
aacauccguaauaggaccuuug

SEQ ID NO: 6031 - RNA, 22 nt, Artificial Sequence
  Synthesized RNAi sequence
aacaucuuuaguuucuacaucu

SEQ ID NO: 6032 - RNA, 22 nt, Artificial Sequence
  Synthesized RNAi sequence
aacaugaagacaguguuuagca

SEQ ID NO: 6033 - RNA, 22 nt, Artificial Sequence
  Synthesized RNAi sequence
aacaugccaaacaauagguuua

SEQ ID NO: 6034 - RNA, 22 nt, Artificial Sequence
  Synthesized RNAi sequence
aacauuaacaacuugucuagua

SEQ ID NO: 6035 - RNA, 22 nt, Artificial Sequence
  Synthesized RNAi sequence
aacauuggcugcauuaacaacc

SEQ ID NO: 6036 - RNA, 22 nt, Artificial Sequence
  Synthesized RNAi sequence
aacauuugggccgacaacauga

SEQ ID NO: 6037 - RNA, 22 nt, Artificial Sequence
  Synthesized RNAi sequence
aacauuuuaacugcaacuuccg

SEQ ID NO: 6038 - RNA, 22 nt, Artificial Sequence
  Synthesized RNAi sequence
aaccaauuauuaacaauuuuac

SEQ ID NO: 6039 - RNA, 22 nt, Artificial Sequence
  Synthesized RNAi sequence
aaccacacccucuuguauuuua

SEQ ID NO: 6040 - RNA, 22 nt, Artificial Sequence
  Synthesized RNAi sequence
aaccacauaagccaagaauuac

SEQ ID NO: 6041 - RNA, 22 nt, Artificial Sequence
  Synthesized RNAi sequence
aaccacuaaaacuauucacuuc

SEQ ID NO: 6042 - RNA, 22 nt, Artificial Sequence
  Synthesized RNAi sequence
aaccacuaagacaaacacuaca

SEQ ID NO: 6043 - RNA, 22 nt, Artificial Sequence
  Synthesized RNAi sequence
aaccagcaagugagaugguuuc

SEQ ID NO: 6044 - RNA, 22 nt, Artificial Sequence
  Synthesized RNAi sequence
aaccaguacaguaagaaggcau

SEQ ID NO: 6045 - RNA, 22 nt, Artificial Sequence
  Synthesized RNAi sequence
aaccaguuaacugguuuaaauc

SEQ ID NO: 6046 - RNA, 22 nt, Artificial Sequence
  Synthesized RNAi sequence
aaccauagcugaaaucggggcc

SEQ ID NO: 6047 - RNA, 22 nt, Artificial Sequence
  Synthesized RNAi sequence
aaccauuauacgcuguaacagc

SEQ ID NO: 6048 - RNA, 22 nt, Artificial Sequence
  Synthesized RNAi sequence
aaccauucuucacuguaacacu

SEQ ID NO: 6049 - RNA, 22 nt, Artificial Sequence
  Synthesized RNAi sequence
aaccauuuaaacccugacccgg

SEQ ID NO: 6050 - RNA, 22 nt, Artificial Sequence
  Synthesized RNAi sequence
aacccugacccggguaaguggu

SEQ ID NO: 6051 - RNA, 22 nt, Artificial Sequence
  Synthesized RNAi sequence
aacccuugccgagcugcugaaa

SEQ ID NO: 6052 - RNA, 22 nt, Artificial Sequence
  Synthesized RNAi sequence
aaccgucuacaacaugcacaua

SEQ ID NO: 6053 - RNA, 22 nt, Artificial Sequence
  Synthesized RNAi sequence
aaccuaauacucuagauaauuc

SEQ ID NO: 6054 - RNA, 22 nt, Artificial Sequence
  Synthesized RNAi sequence
aaccuugcacuucuaucacagu

SEQ ID NO: 6055 - RNA, 22 nt, Artificial Sequence
  Synthesized RNAi sequence
aaccuuuaguguuauuagcucu

SEQ ID NO: 6056 - RNA, 22 nt, Artificial Sequence
  Synthesized RNAi sequence
aacgaauuugauguuucaacug

SEQ ID NO: 6057 - RNA, 22 nt, Artificial Sequence
  Synthesized RNAi sequence
aacgauguaagaagacugguca

SEQ ID NO: 6058 - RNA, 22 nt, Artificial Sequence
  Synthesized RNAi sequence
aacguaagcaucaaacauuuua

SEQ ID NO: 6059 - RNA, 22 nt, Artificial Sequence
  Synthesized RNAi sequence
aacguauacaccagguauuugg

SEQ ID NO: 6060 - RNA, 22 nt, Artificial Sequence
  Synthesized RNAi sequence
aacguauuaacguaagcaucaa

SEQ ID NO: 6061 - RNA, 22 nt, Artificial Sequence
  Synthesized RNAi sequence
aacgucuuucuguaugguagga

SEQ ID NO: 6062 - RNA, 22 nt, Artificial Sequence
  Synthesized RNAi sequence
aacuaccacccacuuuaagugg

SEQ ID NO: 6063 - RNA, 22 nt, Artificial Sequence
  Synthesized RNAi sequence
aacuaggaucaguuguguggua

SEQ ID NO: 6064 - RNA, 22 nt, Artificial Sequence
  Synthesized RNAi sequence
aacuaucgccaguaacuucuau

SEQ ID NO: 6065 - RNA, 22 nt, Artificial Sequence
  Synthesized RNAi sequence
aacuauggcuuuaguuuccaca

SEQ ID NO: 6066 - RNA, 22 nt, Artificial Sequence
  Synthesized RNAi sequence
aacuauguuaguaguuguacua

SEQ ID NO: 6067 - RNA, 22 nt, Artificial Sequence
  Synthesized RNAi sequence
aacuauucacuucaauagucug

SEQ ID NO: 6068 - RNA, 22 nt, Artificial Sequence
  Synthesized RNAi sequence
aacucaccagacucaucaaaua

SEQ ID NO: 6069 - RNA, 22 nt, Artificial Sequence
  Synthesized RNAi sequence
aacucaccuacugucuuauuac

SEQ ID NO: 6070 - RNA, 22 nt, Artificial Sequence
  Synthesized RNAi sequence
aacucauuguuucucuaacauc

SEQ ID NO: 6071 - RNA, 22 nt, Artificial Sequence
  Synthesized RNAi sequence
aacucauuuacuucuguaccga

SEQ ID NO: 6072 - RNA, 22 nt, Artificial Sequence
  Synthesized RNAi sequence
aacucuauuuguuggaguguua

SEQ ID NO: 6073 - RNA, 22 nt, Artificial Sequence
  Synthesized RNAi sequence
aacucuucuucuucacaaucac

SEQ ID NO: 6074 - RNA, 22 nt, Artificial Sequence
  Synthesized RNAi sequence
aacugaagguuuacuuucaguu

SEQ ID NO: 6075 - RNA, 22 nt, Artificial Sequence
  Synthesized RNAi sequence
aacugcaacuuccgcacuauca

SEQ ID NO: 6076 - RNA, 22 nt, Artificial Sequence
  Synthesized RNAi sequence
aacugcuucaaccaauuauuaa

SEQ ID NO: 6077 - RNA, 22 nt, Artificial Sequence
  Synthesized RNAi sequence
aacugguguaaguuccaucucu

SEQ ID NO: 6078 - RNA, 22 nt, Artificial Sequence
  Synthesized RNAi sequence
aacugguuuuaugguuguugug

SEQ ID NO: 6079 - RNA, 22 nt, Artificial Sequence
  Synthesized RNAi sequence
aacugguuuugugcuccaaaga

SEQ ID NO: 6080 - RNA, 22 nt, Artificial Sequence
  Synthesized RNAi sequence
aacuguagcuggcacuuugaga

SEQ ID NO: 6081 - RNA, 22 nt, Artificial Sequence
  Synthesized RNAi sequence
aacuguagugacaagucucucg

SEQ ID NO: 6082 - RNA, 22 nt, Artificial Sequence
  Synthesized RNAi sequence
aacuguauaggcagagcacuuc

SEQ ID NO: 6083 - RNA, 22 nt, Artificial Sequence
  Synthesized RNAi sequence
aacuguuguccauaugucauug

SEQ ID NO: 6084 - RNA, 22 nt, Artificial Sequence
  Synthesized RNAi sequence
aacuuaaaauuaucgaagcuug

SEQ ID NO: 6085 - RNA, 22 nt, Artificial Sequence
  Synthesized RNAi sequence
aacuuagggucaauuucuguac

SEQ ID NO: 6086 - RNA, 22 nt, Artificial Sequence
  Synthesized RNAi sequence
aacuuaguuucuuccagaguug

SEQ ID NO: 6087 - RNA, 22 nt, Artificial Sequence
  Synthesized RNAi sequence
aacuucaacucuauuuguugga

SEQ ID NO: 6088 - RNA, 22 nt, Artificial Sequence
  Synthesized RNAi sequence
aacuucaccaucuagguggaau

SEQ ID NO: 6089 - RNA, 22 nt, Artificial Sequence
  Synthesized RNAi sequence
aacuucaucacuaauaaaugua

SEQ ID NO: 6090 - RNA, 22 nt, Artificial Sequence
  Synthesized RNAi sequence
aacuuccgcacuaucaccaaca

SEQ ID NO: 6091 - RNA, 22 nt, Artificial Sequence
  Synthesized RNAi sequence
aacuuccucuuuaggaaucuca

SEQ ID NO: 6092 - RNA, 22 nt, Artificial Sequence
  Synthesized RNAi sequence
aacuucgguaguuuucacauua

SEQ ID NO: 6093 - RNA, 22 nt, Artificial Sequence
  Synthesized RNAi sequence
aacuucgugcugauuaaaauuu

SEQ ID NO: 6094 - RNA, 22 nt, Artificial Sequence
  Synthesized RNAi sequence
aacuucuaugucagauugaugu

SEQ ID NO: 6095 - RNA, 22 nt, Artificial Sequence
  Synthesized RNAi sequence
aacuucuucaacacaagcuuug

SEQ ID NO: 6096 - RNA, 22 nt, Artificial Sequence
  Synthesized RNAi sequence
aacuugcauggcauuguuagua

SEQ ID NO: 6097 - RNA, 22 nt, Artificial Sequence
  Synthesized RNAi sequence
aacuugcguguggagguuaaug

SEQ ID NO: 6098 - RNA, 22 nt, Artificial Sequence
  Synthesized RNAi sequence
aacuugucuaguaguugcacau

SEQ ID NO: 6099 - RNA, 22 nt, Artificial Sequence
  Synthesized RNAi sequence
aacuuuguuaagaaaaggcuua

SEQ ID NO: 6100 - RNA, 22 nt, Artificial Sequence
  Synthesized RNAi sequence
aacuuuguuauaggugagcaua

SEQ ID NO: 6101 - RNA, 22 nt, Artificial Sequence
  Synthesized RNAi sequence
aagaaaaggcuuagcauaauua

SEQ ID NO: 6102 - RNA, 22 nt, Artificial Sequence
  Synthesized RNAi sequence
aagaaacaguuccaagaauuuc

SEQ ID NO: 6103 - RNA, 22 nt, Artificial Sequence
  Synthesized RNAi sequence
aagaaagaagugucuuaagauu

SEQ ID NO: 6104 - RNA, 22 nt, Artificial Sequence
  Synthesized RNAi sequence
aagaaagugaugucaaugucac

SEQ ID NO: 6105 - RNA, 22 nt, Artificial Sequence
  Synthesized RNAi sequence
aagaaagugugcccauguacau

SEQ ID NO: 6106 - RNA, 22 nt, Artificial Sequence
  Synthesized RNAi sequence
aagaaauaaggcauauaauuag

SEQ ID NO: 6107 - RNA, 22 nt, Artificial Sequence
  Synthesized RNAi sequence
aagaaauucuauaccuaguugu

SEQ ID NO: 6108 - RNA, 22 nt, Artificial Sequence
  Synthesized RNAi sequence
aagaacaauacauaugugaagc

SEQ ID NO: 6109 - RNA, 22 nt, Artificial Sequence
  Synthesized RNAi sequence
aagaacgucuuucuguauggua

SEQ ID NO: 6110 - RNA, 22 nt, Artificial Sequence
  Synthesized RNAi sequence
aagaagaaguaagauaaccauu

SEQ ID NO: 6111 - RNA, 22 nt, Artificial Sequence
  Synthesized RNAi sequence
aagaagacuggucaguaggauu

SEQ ID NO: 6112 - RNA, 22 nt, Artificial Sequence
  Synthesized RNAi sequence
aagaagauguacauucuaacca

SEQ ID NO: 6113 - RNA, 22 nt, Artificial Sequence
  Synthesized RNAi sequence
aagaaggauaggugucuaaaga

SEQ ID NO: 6114 - RNA, 22 nt, Artificial Sequence
  Synthesized RNAi sequence
aagaaggcaugccuaaauuaga

SEQ ID NO: 6115 - RNA, 22 nt, Artificial Sequence
  Synthesized RNAi sequence
aagaaguaagauaaccauuaua

SEQ ID NO: 6116 - RNA, 22 nt, Artificial Sequence
  Synthesized RNAi sequence
aagaagugucuuaagauuguca

SEQ ID NO: 6117 - RNA, 22 nt, Artificial Sequence
  Synthesized RNAi sequence
aagaaguugaaugucuucaccu

SEQ ID NO: 6118 - RNA, 22 nt, Artificial Sequence
  Synthesized RNAi sequence
aagaaucuaaaccacuaagaca

SEQ ID NO: 6119 - RNA, 22 nt, Artificial Sequence
  Synthesized RNAi sequence
aagaaucuaaauuggcauguug

SEQ ID NO: 6120 - RNA, 22 nt, Artificial Sequence
  Synthesized RNAi sequence
aagaauuacuaauaaaauguac

SEQ ID NO: 6121 - RNA, 22 nt, Artificial Sequence
  Synthesized RNAi sequence
aagaauugucuuucuuauaaua

SEQ ID NO: 6122 - RNA, 22 nt, Artificial Sequence
  Synthesized RNAi sequence
aagaauuucuugcuucucauua

SEQ ID NO: 6123 - RNA, 22 nt, Artificial Sequence
  Synthesized RNAi sequence
aagacaaacacuacaagguaua

SEQ ID NO: 6124 - RNA, 22 nt, Artificial Sequence
  Synthesized RNAi sequence
aagacaacguauacaccaggua

SEQ ID NO: 6125 - RNA, 22 nt, Artificial Sequence
  Synthesized RNAi sequence
aagacauucaacaacaucuuua

SEQ ID NO: 6126 - RNA, 22 nt, Artificial Sequence
  Synthesized RNAi sequence
aagacauugucuaaggacacau

SEQ ID NO: 6127 - RNA, 22 nt, Artificial Sequence
  Synthesized RNAi sequence
aagacuagaauugucuacauaa

SEQ ID NO: 6128 - RNA, 22 nt, Artificial Sequence
  Synthesized RNAi sequence
aagacucuuuugcaagaaucua

SEQ ID NO: 6129 - RNA, 22 nt, Artificial Sequence
  Synthesized RNAi sequence
aagacuggucaguaggauuuau

SEQ ID NO: 6130 - RNA, 22 nt, Artificial Sequence
  Synthesized RNAi sequence
aagagcagcagaaguggcacca

SEQ ID NO: 6131 - RNA, 22 nt, Artificial Sequence
  Synthesized RNAi sequence
aagaggguguguaguguuuaua

SEQ ID NO: 6132 - RNA, 22 nt, Artificial Sequence
  Synthesized RNAi sequence
aagaguggcagaaucuggauga

SEQ ID NO: 6133 - RNA, 22 nt, Artificial Sequence
  Synthesized RNAi sequence
aagaguuucauuuagaucguua

SEQ ID NO: 6134 - RNA, 22 nt, Artificial Sequence
  Synthesized RNAi sequence
aagauaacaguuguuaucugcc

SEQ ID NO: 6135 - RNA, 22 nt, Artificial Sequence
  Synthesized RNAi sequence
aagauaaccauuauacgcugua

SEQ ID NO: 6136 - RNA, 22 nt, Artificial Sequence
  Synthesized RNAi sequence
aagauaagugcacaaaaguuag

SEQ ID NO: 6137 - RNA, 22 nt, Artificial Sequence
  Synthesized RNAi sequence
aagaugaaaugguaauuuguau

SEQ ID NO: 6138 - RNA, 22 nt, Artificial Sequence
  Synthesized RNAi sequence
aagauggauggaaccauucuuc

SEQ ID NO: 6139 - RNA, 22 nt, Artificial Sequence
  Synthesized RNAi sequence
aagauguacauucuaaccauag

SEQ ID NO: 6140 - RNA, 22 nt, Artificial Sequence
  Synthesized RNAi sequence
aagauuauccauucccugcgcg

SEQ ID NO: 6141 - RNA, 22 nt, Artificial Sequence
  Synthesized RNAi sequence
aagauugccauuaaugucaaua

SEQ ID NO: 6142 - RNA, 22 nt, Artificial Sequence
  Synthesized RNAi sequence
aagauugucaaaggugauaacu

SEQ ID NO: 6143 - RNA, 22 nt, Artificial Sequence
  Synthesized RNAi sequence
aagauuguguccgcuuaaaaca

SEQ ID NO: 6144 - RNA, 22 nt, Artificial Sequence
  Synthesized RNAi sequence
aagcaccaaggucacggggugu

SEQ ID NO: 6145 - RNA, 22 nt, Artificial Sequence
  Synthesized RNAi sequence
aagcaccgucuaugcaauacaa

SEQ ID NO: 6146 - RNA, 22 nt, Artificial Sequence
  Synthesized RNAi sequence
aagcacucuuaagaaguugaau

SEQ ID NO: 6147 - RNA, 22 nt, Artificial Sequence
  Synthesized RNAi sequence
aagcagccauuagaucugugug

SEQ ID NO: 6148 - RNA, 22 nt, Artificial Sequence
  Synthesized RNAi sequence
aagcagcgguugaguagauuaa

SEQ ID NO: 6149 - RNA, 22 nt, Artificial Sequence
  Synthesized RNAi sequence
aagcagguuucuuauaaccagu

SEQ ID NO: 6150 - RNA, 22 nt, Artificial Sequence
  Synthesized RNAi sequence
aagcaguuaaaucccauuuaaa

SEQ ID NO: 6151 - RNA, 22 nt, Artificial Sequence
  Synthesized RNAi sequence
aagcaucaaacauuuuaacugc

SEQ ID NO: 6152 - RNA, 22 nt, Artificial Sequence
  Synthesized RNAi sequence
aagcaucuuguagagcaggugg

SEQ ID NO: 6153 - RNA, 22 nt, Artificial Sequence
  Synthesized RNAi sequence
aagcauuucucgcaaauuccaa

SEQ ID NO: 6154 - RNA, 22 nt, Artificial Sequence
  Synthesized RNAi sequence
aagccaaaagcaguuaaauccc

SEQ ID NO: 6155 - RNA, 22 nt, Artificial Sequence
  Synthesized RNAi sequence
aagccaagaauuacuaauaaaa

SEQ ID NO: 6156 - RNA, 22 nt, Artificial Sequence
  Synthesized RNAi sequence
aagccaauuuaaacucaccaga

SEQ ID NO: 6157 - RNA, 22 nt, Artificial Sequence
  Synthesized RNAi sequence
aagccucuagacaaaauuuacc

SEQ ID NO: 6158 - RNA, 22 nt, Artificial Sequence
  Synthesized RNAi sequence
aagccuuuaccuccauuagcau

SEQ ID NO: 6159 - RNA, 22 nt, Artificial Sequence
  Synthesized RNAi sequence
aagcugacuguaguaaacagac

SEQ ID NO: 6160 - RNA, 22 nt, Artificial Sequence
  Synthesized RNAi sequence
aagcuugcguuuggauaugguu

SEQ ID NO: 6161 - RNA, 22 nt, Artificial Sequence
  Synthesized RNAi sequence
aagcuuucgcuagcauuucagu

SEQ ID NO: 6162 - RNA, 22 nt, Artificial Sequence
  Synthesized RNAi sequence
aaggacacauucuuugcaaguu

SEQ ID NO: 6163 - RNA, 22 nt, Artificial Sequence
  Synthesized RNAi sequence
aaggaccuucuaacaccauuaa

SEQ ID NO: 6164 - RNA, 22 nt, Artificial Sequence
  Synthesized RNAi sequence
aaggcauauaauuaguacaaac

SEQ ID NO: 6165 - RNA, 22 nt, Artificial Sequence
  Synthesized RNAi sequence
aaggcaugccuaaauuagacau

SEQ ID NO: 6166 - RNA, 22 nt, Artificial Sequence
  Synthesized RNAi sequence
aaggcuccugcaacaccuccuc

SEQ ID NO: 6167 - RNA, 22 nt, Artificial Sequence
  Synthesized RNAi sequence
aaggcuuagcauaauuagcuau

SEQ ID NO: 6168 - RNA, 22 nt, Artificial Sequence
  Synthesized RNAi sequence
aagggacacuauuaacagcagc

SEQ ID NO: 6169 - RNA, 22 nt, Artificial Sequence
  Synthesized RNAi sequence
aaggguugucugcuguugucca

SEQ ID NO: 6170 - RNA, 22 nt, Artificial Sequence
  Synthesized RNAi sequence
aaggguuuucaaaccuaauacu

SEQ ID NO: 6171 - RNA, 22 nt, Artificial Sequence
  Synthesized RNAi sequence
aagguaaacauuggcugcauua

SEQ ID NO: 6172 - RNA, 22 nt, Artificial Sequence
  Synthesized RNAi sequence
aagguauagaaccaguacagua

SEQ ID NO: 6173 - RNA, 22 nt, Artificial Sequence
  Synthesized RNAi sequence
aagguaucugaacaccuuucuu

SEQ ID NO: 6174 - RNA, 22 nt, Artificial Sequence
  Synthesized RNAi sequence
aaggucacggggugucauguuu

SEQ ID NO: 6175 - RNA, 22 nt, Artificial Sequence
  Synthesized RNAi sequence
aaggugacuccuguuguacuag

SEQ ID NO: 6176 - RNA, 22 nt, Artificial Sequence
  Synthesized RNAi sequence
aaggugauaacuucaccaucua

SEQ ID NO: 6177 - RNA, 22 nt, Artificial Sequence
  Synthesized RNAi sequence
aagguuuaccuugguaaucauc

SEQ ID NO: 6178 - RNA, 22 nt, Artificial Sequence
  Synthesized RNAi sequence
aagguuuacuuucaguuauaaa

SEQ ID NO: 6179 - RNA, 22 nt, Artificial Sequence
  Synthesized RNAi sequence
aaguaaaaucuagcaccauaau

SEQ ID NO: 6180 - RNA, 22 nt, Artificial Sequence
  Synthesized RNAi sequence
aaguaaagauggauggaaccau

SEQ ID NO: 6181 - RNA, 22 nt, Artificial Sequence
  Synthesized RNAi sequence
aaguaaagcaccgucuaugcaa

SEQ ID NO: 6182 - RNA, 22 nt, Artificial Sequence
  Synthesized RNAi sequence
aaguaaauguaccaugcuuaag

SEQ ID NO: 6183 - RNA, 22 nt, Artificial Sequence
  Synthesized RNAi sequence
aaguaacucauuguuucucuaa

SEQ ID NO: 6184 - RNA, 22 nt, Artificial Sequence
  Synthesized RNAi sequence
aaguaacugguuuuaugguugu

SEQ ID NO: 6185 - RNA, 22 nt, Artificial Sequence
  Synthesized RNAi sequence
aaguaagauaaccauuauacgc

SEQ ID NO: 6186 - RNA, 22 nt, Artificial Sequence
  Synthesized RNAi sequence
aaguacuuuaucaauccuuuca

SEQ ID NO: 6187 - RNA, 22 nt, Artificial Sequence
  Synthesized RNAi sequence
aaguagaacuucgugcugauua

SEQ ID NO: 6188 - RNA, 22 nt, Artificial Sequence
  Synthesized RNAi sequence
aaguagacauuugugcgaacag

SEQ ID NO: 6189 - RNA, 22 nt, Artificial Sequence
  Synthesized RNAi sequence
aaguagauaagacauugucuaa

SEQ ID NO: 6190 - RNA, 22 nt, Artificial Sequence
  Synthesized RNAi sequence
aaguaguauguagccauacucc

SEQ ID NO: 6191 - RNA, 22 nt, Artificial Sequence
  Synthesized RNAi sequence
aaguauaaugucuccuacaacu

SEQ ID NO: 6192 - RNA, 22 nt, Artificial Sequence
  Synthesized RNAi sequence
aagucucucgcaacuucaucac

SEQ ID NO: 6193 - RNA, 22 nt, Artificial Sequence
  Synthesized RNAi sequence
aagucuuuugaccagcuuuauc

SEQ ID NO: 6194 - RNA, 22 nt, Artificial Sequence
  Synthesized RNAi sequence
aagugacgcuacaguuguuuua

SEQ ID NO: 6195 - RNA, 22 nt, Artificial Sequence
  Synthesized RNAi sequence
aagugagaugguuucaauaaaa

SEQ ID NO: 6196 - RNA, 22 nt, Artificial Sequence
  Synthesized RNAi sequence
aagugauauucacacucuugua

SEQ ID NO: 6197 - RNA, 22 nt, Artificial Sequence
  Synthesized RNAi sequence
aagugaugucaaugucacuaac

SEQ ID NO: 6198 - RNA, 22 nt, Artificial Sequence
  Synthesized RNAi sequence
aagugcacaaaaguuagcagcu

SEQ ID NO: 6199 - RNA, 22 nt, Artificial Sequence
  Synthesized RNAi sequence
aagugcuaucuuuguuguuaca

SEQ ID NO: 6200 - RNA, 22 nt, Artificial Sequence
  Synthesized RNAi sequence
aaguggcaccaaauuccaaagg

SEQ ID NO: 6201 - RNA, 22 nt, Artificial Sequence
  Synthesized RNAi sequence
aaguggcauuguaacaagaguu

SEQ ID NO: 6202 - RNA, 22 nt, Artificial Sequence
  Synthesized RNAi sequence
aagugguccauuaguagcuaug

SEQ ID NO: 6203 - RNA, 22 nt, Artificial Sequence
  Synthesized RNAi sequence
aagugguuauauaauugucugu

SEQ ID NO: 6204 - RNA, 22 nt, Artificial Sequence
  Synthesized RNAi sequence
aagugucuuaagauugucaaag

SEQ ID NO: 6205 - RNA, 22 nt, Artificial Sequence
  Synthesized RNAi sequence
aagugugcccauguacauaaca

SEQ ID NO: 6206 - RNA, 22 nt, Artificial Sequence
  Synthesized RNAi sequence
aaguguguugauaagugacgcu

SEQ ID NO: 6207 - RNA, 22 nt, Artificial Sequence
  Synthesized RNAi sequence
aaguuaaaccauuaacuugugg

SEQ ID NO: 6208 - RNA, 22 nt, Artificial Sequence
  Synthesized RNAi sequence
aaguuagcagcuucaccagccc

SEQ ID NO: 6209 - RNA, 22 nt, Artificial Sequence
  Synthesized RNAi sequence
aaguuauauguuuauagugacc

SEQ ID NO: 6210 - RNA, 22 nt, Artificial Sequence
  Synthesized RNAi sequence
aaguucaaaagugauauucaca

SEQ ID NO: 6211 - RNA, 22 nt, Artificial Sequence
  Synthesized RNAi sequence
aaguucagcuucugcaguugca

SEQ ID NO: 6212 - RNA, 22 nt, Artificial Sequence
  Synthesized RNAi sequence
aaguucauacugagcagguggu

SEQ ID NO: 6213 - RNA, 22 nt, Artificial Sequence
  Synthesized RNAi sequence
aaguuccaucucuaauugaggu

SEQ ID NO: 6214 - RNA, 22 nt, Artificial Sequence
  Synthesized RNAi sequence
aaguugaaugucuucaccuuug

SEQ ID NO: 6215 - RNA, 22 nt, Artificial Sequence
  Synthesized RNAi sequence
aaguugaugaaaacguauuaac

SEQ ID NO: 6216 - RNA, 22 nt, Artificial Sequence
  Synthesized RNAi sequence
aaguugaugaauuacaaccguc

SEQ ID NO: 6217 - RNA, 22 nt, Artificial Sequence
  Synthesized RNAi sequence
aaguuggaccaaacuguugucc

SEQ ID NO: 6218 - RNA, 22 nt, Artificial Sequence
  Synthesized RNAi sequence
aaguuucuuuagaaguuauaug

SEQ ID NO: 6219 - RNA, 22 nt, Artificial Sequence
  Synthesized RNAi sequence
aaguuuuaaauaaccacuaaaa

SEQ ID NO: 6220 - RNA, 22 nt, Artificial Sequence
  Synthesized RNAi sequence
aaguuuuacacaccacguucaa

SEQ ID NO: 6221 - RNA, 22 nt, Artificial Sequence
  Synthesized RNAi sequence
aaguuuucugugaggaacuuag

SEQ ID NO: 6222 - RNA, 22 nt, Artificial Sequence
  Synthesized RNAi sequence
aauaaaaguagauaagacauug

SEQ ID NO: 6223 - RNA, 22 nt, Artificial Sequence
  Synthesized RNAi sequence
aauaaaaugaugcaaagaagau

SEQ ID NO: 6224 - RNA, 22 nt, Artificial Sequence
  Synthesized RNAi sequence
aauaaaauguucuucagguguu

SEQ ID NO: 6225 - RNA, 22 nt, Artificial Sequence
  Synthesized RNAi sequence
aauaaauguacuaccagcacag

SEQ ID NO: 6226 - RNA, 22 nt, Artificial Sequence
  Synthesized RNAi sequence
aauaaccacuaaaacuauucac

SEQ ID NO: 6227 - RNA, 22 nt, Artificial Sequence
  Synthesized RNAi sequence
aauaagaauugucuuucuuaua

SEQ ID NO: 6228 - RNA, 22 nt, Artificial Sequence
  Synthesized RNAi sequence
aauaagcaucuuguagagcagg

SEQ ID NO: 6229 - RNA, 22 nt, Artificial Sequence
  Synthesized RNAi sequence
aauaaggcauauaauuaguaca

SEQ ID NO: 6230 - RNA, 22 nt, Artificial Sequence
  Synthesized RNAi sequence
aauaaguaguauguagccauac

SEQ ID NO: 6231 - RNA, 22 nt, Artificial Sequence
  Synthesized RNAi sequence
aauaaguuggaccaaacuguug

SEQ ID NO: 6232 - RNA, 22 nt, Artificial Sequence
  Synthesized RNAi sequence
aauaauuaaaugaagccucuag

SEQ ID NO: 6233 - RNA, 22 nt, Artificial Sequence
  Synthesized RNAi sequence
aauaauuguccaacuuaggguc

SEQ ID NO: 6234 - RNA, 22 nt, Artificial Sequence
  Synthesized RNAi sequence
aauacaaaguuucuuuagaagu

SEQ ID NO: 6235 - RNA, 22 nt, Artificial Sequence
  Synthesized RNAi sequence
aauacaagcaccaaggucacgg

SEQ ID NO: 6236 - RNA, 22 nt, Artificial Sequence
  Synthesized RNAi sequence
aauacccuuauauuuacgcugu

SEQ ID NO: 6237 - RNA, 22 nt, Artificial Sequence
  Synthesized RNAi sequence
aauagaaguuaaaccauuaacu

SEQ ID NO: 6238 - RNA, 22 nt, Artificial Sequence
  Synthesized RNAi sequence
aauagaugguagaauguaaaag

SEQ ID NO: 6239 - RNA, 22 nt, Artificial Sequence
  Synthesized RNAi sequence
aauagccuucucuguaaccagu

SEQ ID NO: 6240 - RNA, 22 nt, Artificial Sequence
  Synthesized RNAi sequence
aauaggaccaaucuuuauagga

SEQ ID NO: 6241 - RNA, 22 nt, Artificial Sequence
  Synthesized RNAi sequence
aauaggaccuuuguauucugag

SEQ ID NO: 6242 - RNA, 22 nt, Artificial Sequence
  Synthesized RNAi sequence
aauaggcaaugaaccuuuagug

SEQ ID NO: 6243 - RNA, 22 nt, Artificial Sequence
  Synthesized RNAi sequence
aauaguaagacuagaauugucu

SEQ ID NO: 6244 - RNA, 22 nt, Artificial Sequence
  Synthesized RNAi sequence
aauaguccucacuucucucaaa

SEQ ID NO: 6245 - RNA, 22 nt, Artificial Sequence
  Synthesized RNAi sequence
aauagucugaacaacuggugua

SEQ ID NO: 6246 - RNA, 22 nt, Artificial Sequence
  Synthesized RNAi sequence
aauagugacauuaguagaguuc

SEQ ID NO: 6247 - RNA, 22 nt, Artificial Sequence
  Synthesized RNAi sequence
aauaguuguacauucgacucuu

SEQ ID NO: 6248 - RNA, 22 nt, Artificial Sequence
  Synthesized RNAi sequence
aauauaaaguaacaaguuuucu

SEQ ID NO: 6249 - RNA, 22 nt, Artificial Sequence
  Synthesized RNAi sequence
aauauacacuuuuaucaccucu

SEQ ID NO: 6250 - RNA, 22 nt, Artificial Sequence
  Synthesized RNAi sequence
aauaugacgcgcacuacaguca

SEQ ID NO: 6251 - RNA, 22 nt, Artificial Sequence
  Synthesized RNAi sequence
aaucaacaaacccuugccgagc

SEQ ID NO: 6252 - RNA, 22 nt, Artificial Sequence
  Synthesized RNAi sequence
aaucaaccacacccucuuguau

SEQ ID NO: 6253 - RNA, 22 nt, Artificial Sequence
  Synthesized RNAi sequence
aaucaauagccaccacaucacc

SEQ ID NO: 6254 - RNA, 22 nt, Artificial Sequence
  Synthesized RNAi sequence
aaucaaugcccagugguguaag

SEQ ID NO: 6255 - RNA, 22 nt, Artificial Sequence
  Synthesized RNAi sequence
aaucaucagauucaacuugcau

SEQ ID NO: 6256 - RNA, 22 nt, Artificial Sequence
  Synthesized RNAi sequence
aaucaucagcaaauuugauauu

SEQ ID NO: 6257 - RNA, 22 nt, Artificial Sequence
  Synthesized RNAi sequence
aaucaucuucaguaccauacuc

SEQ ID NO: 6258 - RNA, 22 nt, Artificial Sequence
  Synthesized RNAi sequence
aaucccauuuaaaagaugaaau

SEQ ID NO: 6259 - RNA, 22 nt, Artificial Sequence
  Synthesized RNAi sequence
aaucggggccauuuguacaaga

SEQ ID NO: 6260 - RNA, 22 nt, Artificial Sequence
  Synthesized RNAi sequence
aaucuaaaccacuaagacaaac

SEQ ID NO: 6261 - RNA, 22 nt, Artificial Sequence
  Synthesized RNAi sequence
aaucuaaauuggcauguugaaa

SEQ ID NO: 6262 - RNA, 22 nt, Artificial Sequence
  Synthesized RNAi sequence
aaucuagcaccauaaucaacca

SEQ ID NO: 6263 - RNA, 22 nt, Artificial Sequence
  Synthesized RNAi sequence
aaucucagcgaucuuuuguuca

SEQ ID NO: 6264 - RNA, 22 nt, Artificial Sequence
  Synthesized RNAi sequence
aaucuggaugaagauugccauu

SEQ ID NO: 6265 - RNA, 22 nt, Artificial Sequence
  Synthesized RNAi sequence
aaucuuuaacguuccauaucaa

SEQ ID NO: 6266 - RNA, 22 nt, Artificial Sequence
  Synthesized RNAi sequence
aaucuuuauaggaaccagcaag

SEQ ID NO: 6267 - RNA, 22 nt, Artificial Sequence
  Synthesized RNAi sequence
aaugaaccuuuaguguuauuag

SEQ ID NO: 6268 - RNA, 22 nt, Artificial Sequence
  Synthesized RNAi sequence
aaugaagccucuagacaaaauu

SEQ ID NO: 6269 - RNA, 22 nt, Artificial Sequence
  Synthesized RNAi sequence
aaugacaugaaaucuuuaacgu

SEQ ID NO: 6270 - RNA, 22 nt, Artificial Sequence
  Synthesized RNAi sequence
aaugagagagagaaugucuuuc

SEQ ID NO: 6271 - RNA, 22 nt, Artificial Sequence
  Synthesized RNAi sequence
aaugaugcaaagaagauguaca

SEQ ID NO: 6272 - RNA, 22 nt, Artificial Sequence
  Synthesized RNAi sequence
aaugcaguggcaagauaacagu

SEQ ID NO: 6273 - RNA, 22 nt, Artificial Sequence
  Synthesized RNAi sequence
aaugcccagugguguaaguaau

SEQ ID NO: 6274 - RNA, 22 nt, Artificial Sequence
  Synthesized RNAi sequence
aaugcugacauguaccuaccca

SEQ ID NO: 6275 - RNA, 22 nt, Artificial Sequence
  Synthesized RNAi sequence
aauggcuuaacuuccucuuuag

SEQ ID NO: 6276 - RNA, 22 nt, Artificial Sequence
  Synthesized RNAi sequence
aaugguaauuuguauaguuucu

SEQ ID NO: 6277 - RNA, 22 nt, Artificial Sequence
  Synthesized RNAi sequence
aauggugcaaguagaacuucgu

SEQ ID NO: 6278 - RNA, 22 nt, Artificial Sequence
  Synthesized RNAi sequence
aauguaccaugcuuaaguucau

SEQ ID NO: 6279 - RNA, 22 nt, Artificial Sequence
  Synthesized RNAi sequence
aaugucaauauaaaguaacaag

SEQ ID NO: 6280 - RNA, 22 nt, Artificial Sequence
  Synthesized RNAi sequence
aaugucacuaacaagaguggca

SEQ ID NO: 6281 - RNA, 22 nt, Artificial Sequence
  Synthesized RNAi sequence
aaugucuccuacaacuucggua

SEQ ID NO: 6282 - RNA, 22 nt, Artificial Sequence
  Synthesized RNAi sequence
aaugucuucaccuuuguuaaca

SEQ ID NO: 6283 - RNA, 22 nt, Artificial Sequence
  Synthesized RNAi sequence
aaugugguaggauuacuagugu

SEQ ID NO: 6284 - RNA, 22 nt, Artificial Sequence
  Synthesized RNAi sequence
aauguucuucagguguuuuaga

SEQ ID NO: 6285 - RNA, 22 nt, Artificial Sequence
  Synthesized RNAi sequence
aauguugucuacuguuguaaac

SEQ ID NO: 6286 - RNA, 22 nt, Artificial Sequence
  Synthesized RNAi sequence
aauguuuuaccuucaugugaau

SEQ ID NO: 6287 - RNA, 22 nt, Artificial Sequence
  Synthesized RNAi sequence
aauuaaaugaagccucuagaca

SEQ ID NO: 6288 - RNA, 22 nt, Artificial Sequence
  Synthesized RNAi sequence
aauuacaaccgucuacaacaug

SEQ ID NO: 6289 - RNA, 22 nt, Artificial Sequence
  Synthesized RNAi sequence
aauuaccaguguacucacuagc

SEQ ID NO: 6290 - RNA, 22 nt, Artificial Sequence
  Synthesized RNAi sequence
aauuagacauuaaaacaccuaa

SEQ ID NO: 6291 - RNA, 22 nt, Artificial Sequence
  Synthesized RNAi sequence
aauuagcuauaguaucccaagg

SEQ ID NO: 6292 - RNA, 22 nt, Artificial Sequence
  Synthesized RNAi sequence
aauuaguacaaacacgguuuaa

SEQ ID NO: 6293 - RNA, 22 nt, Artificial Sequence
  Synthesized RNAi sequence
aauuaucgaagcuugcguuugg

SEQ ID NO: 6294 - RNA, 22 nt, Artificial Sequence
  Synthesized RNAi sequence
aauuauuaacaauuuuaccacc

SEQ ID NO: 6295 - RNA, 22 nt, Artificial Sequence
  Synthesized RNAi sequence
aauucauuagguuucuuaauag

SEQ ID NO: 6296 - RNA, 22 nt, Artificial Sequence
  Synthesized RNAi sequence
aauuccaaagguuuaccuuggu

SEQ ID NO: 6297 - RNA, 22 nt, Artificial Sequence
  Synthesized RNAi sequence
aauuccaagaaacaguuccaag

SEQ ID NO: 6298 - RNA, 22 nt, Artificial Sequence
  Synthesized RNAi sequence
aauucuagaauuuguacuucua

SEQ ID NO: 6299 - RNA, 22 nt, Artificial Sequence
  Synthesized RNAi sequence
aauucuauaccuaguuguguag

SEQ ID NO: 6300 - RNA, 22 nt, Artificial Sequence
  Synthesized RNAi sequence
aauuggcauguugaaacaagua

SEQ ID NO: 6301 - RNA, 22 nt, Artificial Sequence
  Synthesized RNAi sequence
aauugucuacauaagcagccau

SEQ ID NO: 6302 - RNA, 22 nt, Artificial Sequence
  Synthesized RNAi sequence
aauugucuguuggcacuuuucu

SEQ ID NO: 6303 - RNA, 22 nt, Artificial Sequence
  Synthesized RNAi sequence
aauuguucauaagaaagugugc

SEQ ID NO: 6304 - RNA, 22 nt, Artificial Sequence
  Synthesized RNAi sequence
aauuuaaacucaccagacucau

SEQ ID NO: 6305 - RNA, 22 nt, Artificial Sequence
  Synthesized RNAi sequence
aauuuaagccauguguuacaua

SEQ ID NO: 6306 - RNA, 22 nt, Artificial Sequence
  Synthesized RNAi sequence
aauuuaccgacacucuuaacag

SEQ ID NO: 6307 - RNA, 22 nt, Artificial Sequence
  Synthesized RNAi sequence
aauuuagcuccuuucuuaaaag

SEQ ID NO: 6308 - RNA, 22 nt, Artificial Sequence
  Synthesized RNAi sequence
aauuuauaaguaacugguuuua

SEQ ID NO: 6309 - RNA, 22 nt, Artificial Sequence
  Synthesized RNAi sequence
aauuucuguacaaacaacacca

SEQ ID NO: 6310 - RNA, 22 nt, Artificial Sequence
  Synthesized RNAi sequence
aauuucuugcuucucauuagag

SEQ ID NO: 6311 - RNA, 22 nt, Artificial Sequence
  Synthesized RNAi sequence
aauuugauauuaucacauacaa

SEQ ID NO: 6312 - RNA, 22 nt, Artificial Sequence
  Synthesized RNAi sequence
aauuugauguuucaacugguuu

SEQ ID NO: 6313 - RNA, 22 nt, Artificial Sequence
  Synthesized RNAi sequence
aauuugcguguuucuucugcau

SEQ ID NO: 6314 - RNA, 22 nt, Artificial Sequence
  Synthesized RNAi sequence
aauuuguauaguuucuaaagaa

SEQ ID NO: 6315 - RNA, 22 nt, Artificial Sequence
  Synthesized RNAi sequence
aauuuuaccacccuuaagugcu

SEQ ID NO: 6316 - RNA, 22 nt, Artificial Sequence
  Synthesized RNAi sequence
aauuuucauaagcacucuuaag

SEQ ID NO: 6317 - RNA, 22 nt, Artificial Sequence
  Synthesized RNAi sequence
acaaaaguuagcagcuucacca

SEQ ID NO: 6318 - RNA, 22 nt, Artificial Sequence
  Synthesized RNAi sequence
acaaaaugagagagagaauguc

SEQ ID NO: 6319 - RNA, 22 nt, Artificial Sequence
  Synthesized RNAi sequence
acaaaauuuaccgacacucuua

SEQ ID NO: 6320 - RNA, 22 nt, Artificial Sequence
  Synthesized RNAi sequence
acaaacacgguuuaaacaccgu

SEQ ID NO: 6321 - RNA, 22 nt, Artificial Sequence
  Synthesized RNAi sequence
acaaacacuacaagguauagaa

SEQ ID NO: 6322 - RNA, 22 nt, Artificial Sequence
  Synthesized RNAi sequence
acaaacccuugccgagcugcug

SEQ ID NO: 6323 - RNA, 22 nt, Artificial Sequence
  Synthesized RNAi sequence
acaaacucuuaaagaauguaua

SEQ ID NO: 6324 - RNA, 22 nt, Artificial Sequence
  Synthesized RNAi sequence
acaaacuuaaaauuaucgaagc

SEQ ID NO: 6325 - RNA, 22 nt, Artificial Sequence
  Synthesized RNAi sequence
acaaaguuucuuuagaaguuau

SEQ ID NO: 6326 - RNA, 22 nt, Artificial Sequence
  Synthesized RNAi sequence
acaacacaggcgaacucauuua

SEQ ID NO: 6327 - RNA, 22 nt, Artificial Sequence
  Synthesized RNAi sequence
acaacaccauccaauuuauaag

SEQ ID NO: 6328 - RNA, 22 nt, Artificial Sequence
  Synthesized RNAi sequence
acaacaucacccacuauauaug

SEQ ID NO: 6329 - RNA, 22 nt, Artificial Sequence
  Synthesized RNAi sequence
acaacaucuuuaguuucuacau

SEQ ID NO: 6330 - RNA, 22 nt, Artificial Sequence
  Synthesized RNAi sequence
acaacaugaagacaguguuuag

SEQ ID NO: 6331 - RNA, 22 nt, Artificial Sequence
  Synthesized RNAi sequence
acaacaugcacauaacuuuucc

SEQ ID NO: 6332 - RNA, 22 nt, Artificial Sequence
  Synthesized RNAi sequence
acaacauuaacaacuugucuag

SEQ ID NO: 6333 - RNA, 22 nt, Artificial Sequence
  Synthesized RNAi sequence
acaaccgucuacaacaugcaca

SEQ ID NO: 6334 - RNA, 22 nt, Artificial Sequence
  Synthesized RNAi sequence
acaacuaccacccacuuuaagu

SEQ ID NO: 6335 - RNA, 22 nt, Artificial Sequence
  Synthesized RNAi sequence
acaacuaucgccaguaacuucu

SEQ ID NO: 6336 - RNA, 22 nt, Artificial Sequence
  Synthesized RNAi sequence
acaacugguguaaguuccaucu

SEQ ID NO: 6337 - RNA, 22 nt, Artificial Sequence
  Synthesized RNAi sequence
acaacuucgguaguuuucacau

SEQ ID NO: 6338 - RNA, 22 nt, Artificial Sequence
  Synthesized RNAi sequence
acaacuugcguguggagguuaa

SEQ ID NO: 6339 - RNA, 22 nt, Artificial Sequence
  Synthesized RNAi sequence
acaacuuuguuaagaaaaggcu

SEQ ID NO: 6340 - RNA, 22 nt, Artificial Sequence
  Synthesized RNAi sequence
acaagaguggcagaaucuggau

SEQ ID NO: 6341 - RNA, 22 nt, Artificial Sequence
  Synthesized RNAi sequence
acaagaguuucauuuagaucgu

SEQ ID NO: 6342 - RNA, 22 nt, Artificial Sequence
  Synthesized RNAi sequence
acaagauuaauuauuaaccaca

SEQ ID NO: 6343 - RNA, 22 nt, Artificial Sequence
  Synthesized RNAi sequence
acaagcuuugauuuucuuauca

SEQ ID NO: 6344 - RNA, 22 nt, Artificial Sequence
  Synthesized RNAi sequence
acaagguauagaaccaguacag

SEQ ID NO: 6345 - RNA, 22 nt, Artificial Sequence
  Synthesized RNAi sequence
acaagguaucugaacaccuuuc

SEQ ID NO: 6346 - RNA, 22 nt, Artificial Sequence
  Synthesized RNAi sequence
acaaguaaauguaccaugcuua

SEQ ID NO: 6347 - RNA, 22 nt, Artificial Sequence
  Synthesized RNAi sequence
acaaguaacucauuguuucucu

SEQ ID NO: 6348 - RNA, 22 nt, Artificial Sequence
  Synthesized RNAi sequence
acaagucucucgcaacuucauc

SEQ ID NO: 6349 - RNA, 22 nt, Artificial Sequence
  Synthesized RNAi sequence
acaaguugaugaauuacaaccg

SEQ ID NO: 6350 - RNA, 22 nt, Artificial Sequence
  Synthesized RNAi sequence
acaaguuuuacacaccacguuc

SEQ ID NO: 6351 - RNA, 22 nt, Artificial Sequence
  Synthesized RNAi sequence
acaaguuuucugugaggaacuu

SEQ ID NO: 6352 - RNA, 22 nt, Artificial Sequence
  Synthesized RNAi sequence
acaauagguuuauguaacaauu

SEQ ID NO: 6353 - RNA, 22 nt, Artificial Sequence
  Synthesized RNAi sequence
acaauaguuguacauucgacuc

SEQ ID NO: 6354 - RNA, 22 nt, Artificial Sequence
  Synthesized RNAi sequence
acaaucaccuucuucuucaucc

SEQ ID NO: 6355 - RNA, 22 nt, Artificial Sequence
  Synthesized RNAi sequence
acaaugacaugaaaucuuuaac

SEQ ID NO: 6356 - RNA, 22 nt, Artificial Sequence
  Synthesized RNAi sequence
acaaugcaguggcaagauaaca

SEQ ID NO: 6357 - RNA, 22 nt, Artificial Sequence
  Synthesized RNAi sequence
acaauuuagcuccuuucuuaaa

SEQ ID NO: 6358 - RNA, 22 nt, Artificial Sequence
  Synthesized RNAi sequence
acacaaacucuuaaagaaugua

SEQ ID NO: 6359 - RNA, 22 nt, Artificial Sequence
  Synthesized RNAi sequence
acacaacuaccacccacuuuaa

SEQ ID NO: 6360 - RNA, 22 nt, Artificial Sequence
  Synthesized RNAi sequence
acacaagcuuugauuuucuuau

SEQ ID NO: 6361 - RNA, 22 nt, Artificial Sequence
  Synthesized RNAi sequence
acacaccacguucaagacucuu

SEQ ID NO: 6362 - RNA, 22 nt, Artificial Sequence
  Synthesized RNAi sequence
acacagacaggcauuaauuugc

SEQ ID NO: 6363 - RNA, 22 nt, Artificial Sequence
  Synthesized RNAi sequence
acacaggcgaacucauuuacuu

SEQ ID NO: 6364 - RNA, 22 nt, Artificial Sequence
  Synthesized RNAi sequence
acacauaagcugacuguaguaa

SEQ ID NO: 6365 - RNA, 22 nt, Artificial Sequence
  Synthesized RNAi sequence
acacaucauacaaguugaugaa

SEQ ID NO: 6366 - RNA, 22 nt, Artificial Sequence
  Synthesized RNAi sequence
acacauucuuugcaaguucagc

SEQ ID NO: 6367 - RNA, 22 nt, Artificial Sequence
  Synthesized RNAi sequence
acaccagguauuugguuuauac

SEQ ID NO: 6368 - RNA, 22 nt, Artificial Sequence
  Synthesized RNAi sequence
acaccauccaauuuauaaguaa

SEQ ID NO: 6369 - RNA, 22 nt, Artificial Sequence
  Synthesized RNAi sequence
acaccauuaacaauaguuguac

SEQ ID NO: 6370 - RNA, 22 nt, Artificial Sequence
  Synthesized RNAi sequence
acacccucuugaacaacaucac

SEQ ID NO: 6371 - RNA, 22 nt, Artificial Sequence
  Synthesized RNAi sequence
acacccucuuguauuuuaauac

SEQ ID NO: 6372 - RNA, 22 nt, Artificial Sequence
  Synthesized RNAi sequence
acacccuuaaggguugucugcu

SEQ ID NO: 6373 - RNA, 22 nt, Artificial Sequence
  Synthesized RNAi sequence
acaccguguaacuauguuagua

SEQ ID NO: 6374 - RNA, 22 nt, Artificial Sequence
  Synthesized RNAi sequence
acaccuaaagcagcgguugagu

SEQ ID NO: 6375 - RNA, 22 nt, Artificial Sequence
  Synthesized RNAi sequence
acaccuccuccauguuuaaggu

SEQ ID NO: 6376 - RNA, 22 nt, Artificial Sequence
  Synthesized RNAi sequence
acaccuuaauaguccucacuuc

SEQ ID NO: 6377 - RNA, 22 nt, Artificial Sequence
  Synthesized RNAi sequence
acaccuuucuuaaauuguucau

SEQ ID NO: 6378 - RNA, 22 nt, Artificial Sequence
  Synthesized RNAi sequence
acacgguuuaaacaccguguaa

SEQ ID NO: 6379 - RNA, 22 nt, Artificial Sequence
  Synthesized RNAi sequence
acacguacaagguaucugaaca

SEQ ID NO: 6380 - RNA, 22 nt, Artificial Sequence
  Synthesized RNAi sequence
acacguagagugucaucauuag

SEQ ID NO: 6381 - RNA, 22 nt, Artificial Sequence
  Synthesized RNAi sequence
acacuaaugccugaucuaguaa

SEQ ID NO: 6382 - RNA, 22 nt, Artificial Sequence
  Synthesized RNAi sequence
acacuacaagguauagaaccag

SEQ ID NO: 6383 - RNA, 22 nt, Artificial Sequence
  Synthesized RNAi sequence
acacuaucaacgauguaagaag

SEQ ID NO: 6384 - RNA, 22 nt, Artificial Sequence
  Synthesized RNAi sequence
acacuauuaacagcagcuaaac

SEQ ID NO: 6385 - RNA, 22 nt, Artificial Sequence
  Synthesized RNAi sequence
acacucaagaacgucuuucugu

SEQ ID NO: 6386 - RNA, 22 nt, Artificial Sequence
  Synthesized RNAi sequence
acacucuuaacaguauucuuug

SEQ ID NO: 6387 - RNA, 22 nt, Artificial Sequence
  Synthesized RNAi sequence
acacucuuguaaccuugcacuu

SEQ ID NO: 6388 - RNA, 22 nt, Artificial Sequence
  Synthesized RNAi sequence
acacugguaauuaccaguguac

SEQ ID NO: 6389 - RNA, 22 nt, Artificial Sequence
  Synthesized RNAi sequence
acacuuuuaucaccucucuuaa

SEQ ID NO: 6390 - RNA, 22 nt, Artificial Sequence
  Synthesized RNAi sequence
acagaaacuguagcuggcacuu

SEQ ID NO: 6391 - RNA, 22 nt, Artificial Sequence
  Synthesized RNAi sequence
acagacaggcauuaauuugcgu

SEQ ID NO: 6392 - RNA, 22 nt, Artificial Sequence
  Synthesized RNAi sequence
acagacgcugauuuugcagaug

SEQ ID NO: 6393 - RNA, 22 nt, Artificial Sequence
  Synthesized RNAi sequence
acagcagcuaaaccaugaguag

SEQ ID NO: 6394 - RNA, 22 nt, Artificial Sequence
  Synthesized RNAi sequence
acagcaguuaaaacacccucuu

SEQ ID NO: 6395 - RNA, 22 nt, Artificial Sequence
  Synthesized RNAi sequence
acagcaucaggugaagaaacag

SEQ ID NO: 6396 - RNA, 22 nt, Artificial Sequence
  Synthesized RNAi sequence
acagcuucuacacccuuaaggg

SEQ ID NO: 6397 - RNA, 22 nt, Artificial Sequence
  Synthesized RNAi sequence
acaggcauuaauuugcguguuu

SEQ ID NO: 6398 - RNA, 22 nt, Artificial Sequence
  Synthesized RNAi sequence
acaggcgaacucauuuacuucu

SEQ ID NO: 6399 - RNA, 22 nt, Artificial Sequence
  Synthesized RNAi sequence
acaguaagaaggcaugccuaaa

SEQ ID NO: 6400 - RNA, 22 nt, Artificial Sequence
  Synthesized RNAi sequence
acaguaggcuaagauaagugca

SEQ ID NO: 6401 - RNA, 22 nt, Artificial Sequence
  Synthesized RNAi sequence
acaguagguugcaauagugaca

SEQ ID NO: 6402 - RNA, 22 nt, Artificial Sequence
  Synthesized RNAi sequence
acaguauagguugacacauaag

SEQ ID NO: 6403 - RNA, 22 nt, Artificial Sequence
  Synthesized RNAi sequence
acaguaucuacacaaacucuua

SEQ ID NO: 6404 - RNA, 22 nt, Artificial Sequence
  Synthesized RNAi sequence
acagucaauacaagcaccaagg

SEQ ID NO: 6405 - RNA, 22 nt, Artificial Sequence
  Synthesized RNAi sequence
acaguguaaccauuuaaacccu

SEQ ID NO: 6406 - RNA, 22 nt, Artificial Sequence
  Synthesized RNAi sequence
acaguguuuagcaagauugugu

SEQ ID NO: 6407 - RNA, 22 nt, Artificial Sequence
  Synthesized RNAi sequence
acaguuccaagaauuucuugcu

SEQ ID NO: 6408 - RNA, 22 nt, Artificial Sequence
  Synthesized RNAi sequence
acaguuguuaucugcccauuua

SEQ ID NO: 6409 - RNA, 22 nt, Artificial Sequence
  Synthesized RNAi sequence
acaguuguuuuacugguguaaa

SEQ ID NO: 6410 - RNA, 22 nt, Artificial Sequence
  Synthesized RNAi sequence
acaguuuguugacuaucaucau

SEQ ID NO: 6411 - RNA, 22 nt, Artificial Sequence
  Synthesized RNAi sequence
acauaaaaggaccuucuaacac

SEQ ID NO: 6412 - RNA, 22 nt, Artificial Sequence
  Synthesized RNAi sequence
acauaacagcuucuacacccuu

SEQ ID NO: 6413 - RNA, 22 nt, Artificial Sequence
  Synthesized RNAi sequence
acauaagcagccauuagaucug

SEQ ID NO: 6414 - RNA, 22 nt, Artificial Sequence
  Synthesized RNAi sequence
acauaagccaagaauuacuaau

SEQ ID NO: 6415 - RNA, 22 nt, Artificial Sequence
  Synthesized RNAi sequence
acauaagcugacuguaguaaac

SEQ ID NO: 6416 - RNA, 22 nt, Artificial Sequence
  Synthesized RNAi sequence
acauaauaaaaugaugcaaaga

SEQ ID NO: 6417 - RNA, 22 nt, Artificial Sequence
  Synthesized RNAi sequence
acauacaaacuuaaaauuaucg

SEQ ID NO: 6418 - RNA, 22 nt, Artificial Sequence
  Synthesized RNAi sequence
acauagccaaguggcauuguaa

SEQ ID NO: 6419 - RNA, 22 nt, Artificial Sequence
  Synthesized RNAi sequence
acauaugugaagccaauuuaaa

SEQ ID NO: 6420 - RNA, 22 nt, Artificial Sequence
  Synthesized RNAi sequence
acaucaaacgaauuugauguuu

SEQ ID NO: 6421 - RNA, 22 nt, Artificial Sequence
  Synthesized RNAi sequence
acaucacccacuauauauggag

SEQ ID NO: 6422 - RNA, 22 nt, Artificial Sequence
  Synthesized RNAi sequence
acaucaccuaacucaccuacug

SEQ ID NO: 6423 - RNA, 22 nt, Artificial Sequence
  Synthesized RNAi sequence
acaucagacacuaaugccugau

SEQ ID NO: 6424 - RNA, 22 nt, Artificial Sequence
  Synthesized RNAi sequence
acaucagcuccauccaaauaag

SEQ ID NO: 6425 - RNA, 22 nt, Artificial Sequence
  Synthesized RNAi sequence
acaucauaacaaaaggugacuc

SEQ ID NO: 6426 - RNA, 22 nt, Artificial Sequence
  Synthesized RNAi sequence
acaucauacaaguugaugaauu

SEQ ID NO: 6427 - RNA, 22 nt, Artificial Sequence
  Synthesized RNAi sequence
acauccguaauaggaccuuugu

SEQ ID NO: 6428 - RNA, 22 nt, Artificial Sequence
  Synthesized RNAi sequence
acaucugaaucaacaaacccuu

SEQ ID NO: 6429 - RNA, 22 nt, Artificial Sequence
  Synthesized RNAi sequence
acaucuuuaguuucuacaucug

SEQ ID NO: 6430 - RNA, 22 nt, Artificial Sequence
  Synthesized RNAi sequence
acaugaaaucuuuaacguucca

SEQ ID NO: 6431 - RNA, 22 nt, Artificial Sequence
  Synthesized RNAi sequence
acaugaagacaguguuuagcaa

SEQ ID NO: 6432 - RNA, 22 nt, Artificial Sequence
  Synthesized RNAi sequence
acaugcacauaacuuuuccaua

SEQ ID NO: 6433 - RNA, 22 nt, Artificial Sequence
  Synthesized RNAi sequence
acaugccaaacaauagguuuau

SEQ ID NO: 6434 - RNA, 22 nt, Artificial Sequence
  Synthesized RNAi sequence
acauguaccuacccagaaaacu

SEQ ID NO: 6435 - RNA, 22 nt, Artificial Sequence
  Synthesized RNAi sequence
acauguccacaacuugcgugug

SEQ ID NO: 6436 - RNA, 22 nt, Artificial Sequence
  Synthesized RNAi sequence
acauuaaaacaccuaaagcagc

SEQ ID NO: 6437 - RNA, 22 nt, Artificial Sequence
  Synthesized RNAi sequence
acauuaacaacuugucuaguag

SEQ ID NO: 6438 - RNA, 22 nt, Artificial Sequence
  Synthesized RNAi sequence
acauuacacucaagaacgucuu

SEQ ID NO: 6439 - RNA, 22 nt, Artificial Sequence
  Synthesized RNAi sequence
acauuaguagaguucaaauagc

SEQ ID NO: 6440 - RNA, 22 nt, Artificial Sequence
  Synthesized RNAi sequence
acauucaacaacaucuuuaguu

SEQ ID NO: 6441 - RNA, 22 nt, Artificial Sequence
  Synthesized RNAi sequence
acauucgacucuuguugcucua

SEQ ID NO: 6442 - RNA, 22 nt, Artificial Sequence
  Synthesized RNAi sequence
acauucuaaccauagcugaaau

SEQ ID NO: 6443 - RNA, 22 nt, Artificial Sequence
  Synthesized RNAi sequence
acauucuuugcaaguucagcuu

SEQ ID NO: 6444 - RNA, 22 nt, Artificial Sequence
  Synthesized RNAi sequence
acauuggcugcauuaacaacca

SEQ ID NO: 6445 - RNA, 22 nt, Artificial Sequence
  Synthesized RNAi sequence
acauugucuaaggacacauucu

SEQ ID NO: 6446 - RNA, 22 nt, Artificial Sequence
  Synthesized RNAi sequence
acauuugggccgacaacaugaa

SEQ ID NO: 6447 - RNA, 22 nt, Artificial Sequence
  Synthesized RNAi sequence
acauuugugcgaacaguaucua

SEQ ID NO: 6448 - RNA, 22 nt, Artificial Sequence
  Synthesized RNAi sequence
acauuuuaacugcaacuuccgc

SEQ ID NO: 6449 - RNA, 22 nt, Artificial Sequence
  Synthesized RNAi sequence
accaaacuguuguccauauguc

SEQ ID NO: 6450 - RNA, 22 nt, Artificial Sequence
  Synthesized RNAi sequence
accaaauuccaaagguuuaccu

SEQ ID NO: 6451 - RNA, 22 nt, Artificial Sequence
  Synthesized RNAi sequence
accaacaguuuguugacuauca

SEQ ID NO: 6452 - RNA, 22 nt, Artificial Sequence
  Synthesized RNAi sequence
accaacaucagacacuaaugcc

SEQ ID NO: 6453 - RNA, 22 nt, Artificial Sequence
  Synthesized RNAi sequence
accaaggucacggggugucaug

SEQ ID NO: 6454 - RNA, 22 nt, Artificial Sequence
  Synthesized RNAi sequence
accaaucuucuucuugcucuuc

SEQ ID NO: 6455 - RNA, 22 nt, Artificial Sequence
  Synthesized RNAi sequence
accaaucuuuauaggaaccagc

SEQ ID NO: 6456 - RNA, 22 nt, Artificial Sequence
  Synthesized RNAi sequence
accaauuauuaacaauuuuacc

SEQ ID NO: 6457 - RNA, 22 nt, Artificial Sequence
  Synthesized RNAi sequence
accacacccucuuguauuuuaa

SEQ ID NO: 6458 - RNA, 22 nt, Artificial Sequence
  Synthesized RNAi sequence
accacacguacaagguaucuga

SEQ ID NO: 6459 - RNA, 22 nt, Artificial Sequence
  Synthesized RNAi sequence
accacacugguaauuaccagug

SEQ ID NO: 6460 - RNA, 22 nt, Artificial Sequence
  Synthesized RNAi sequence
accacagcaguuaaaacacccu

SEQ ID NO: 6461 - RNA, 22 nt, Artificial Sequence
  Synthesized RNAi sequence
accacauaagccaagaauuacu

SEQ ID NO: 6462 - RNA, 22 nt, Artificial Sequence
  Synthesized RNAi sequence
accacccacuuuaaguggucca

SEQ ID NO: 6463 - RNA, 22 nt, Artificial Sequence
  Synthesized RNAi sequence
accacccuuaagugcuaucuuu

SEQ ID NO: 6464 - RNA, 22 nt, Artificial Sequence
  Synthesized RNAi sequence
accacguucaagacucuuuugc

SEQ ID NO: 6465 - RNA, 22 nt, Artificial Sequence
  Synthesized RNAi sequence
accacuaaaacuauucacuuca

SEQ ID NO: 6466 - RNA, 22 nt, Artificial Sequence
  Synthesized RNAi sequence
accacuaagacaaacacuacaa

SEQ ID NO: 6467 - RNA, 22 nt, Artificial Sequence
  Synthesized RNAi sequence
accagacucaucaaauaaguag

SEQ ID NO: 6468 - RNA, 22 nt, Artificial Sequence
  Synthesized RNAi sequence
accagcaagugagaugguuuca

SEQ ID NO: 6469 - RNA, 22 nt, Artificial Sequence
  Synthesized RNAi sequence
accagcacagaauguaucacaa

SEQ ID NO: 6470 - RNA, 22 nt, Artificial Sequence
  Synthesized RNAi sequence
accagcccuugcucuguaauaa

SEQ ID NO: 6471 - RNA, 22 nt, Artificial Sequence
  Synthesized RNAi sequence
accagcuuuaucaaaguaaaga

SEQ ID NO: 6472 - RNA, 22 nt, Artificial Sequence
  Synthesized RNAi sequence
accagguauuugguuuauacgu

SEQ ID NO: 6473 - RNA, 22 nt, Artificial Sequence
  Synthesized RNAi sequence
accaguacaguaagaaggcaug

SEQ ID NO: 6474 - RNA, 22 nt, Artificial Sequence
  Synthesized RNAi sequence
accaguacaguagguugcaaua

SEQ ID NO: 6475 - RNA, 22 nt, Artificial Sequence
  Synthesized RNAi sequence
accaguguacucacuagcacaa

SEQ ID NO: 6476 - RNA, 22 nt, Artificial Sequence
  Synthesized RNAi sequence
accaguuaacugguuuaaauca

SEQ ID NO: 6477 - RNA, 22 nt, Artificial Sequence
  Synthesized RNAi sequence
accauaaucaaccacacccucu

SEQ ID NO: 6478 - RNA, 22 nt, Artificial Sequence
  Synthesized RNAi sequence
accauacucauauugaguugau

SEQ ID NO: 6479 - RNA, 22 nt, Artificial Sequence
  Synthesized RNAi sequence
accauagcugaaaucggggcca

SEQ ID NO: 6480 - RNA, 22 nt, Artificial Sequence
  Synthesized RNAi sequence
accauccaauuuauaaguaacu

SEQ ID NO: 6481 - RNA, 22 nt, Artificial Sequence
  Synthesized RNAi sequence
accaucuagguggaauguggua

SEQ ID NO: 6482 - RNA, 22 nt, Artificial Sequence
  Synthesized RNAi sequence
accaugcuuaaguucauacuga

SEQ ID NO: 6483 - RNA, 22 nt, Artificial Sequence
  Synthesized RNAi sequence
accauuaacaauaguuguacau

SEQ ID NO: 6484 - RNA, 22 nt, Artificial Sequence
  Synthesized RNAi sequence
accauuauacgcuguaacagca

SEQ ID NO: 6485 - RNA, 22 nt, Artificial Sequence
  Synthesized RNAi sequence
accauucuucacuguaacacua

SEQ ID NO: 6486 - RNA, 22 nt, Artificial Sequence
  Synthesized RNAi sequence
accauuuaaacccugacccggg

SEQ ID NO: 6487 - RNA, 22 nt, Artificial Sequence
  Synthesized RNAi sequence
acccacuauauauggagcaucu

SEQ ID NO: 6488 - RNA, 22 nt, Artificial Sequence
  Synthesized RNAi sequence
acccacuuuaagugguccauua

SEQ ID NO: 6489 - RNA, 22 nt, Artificial Sequence
  Synthesized RNAi sequence
acccagaaaacuaggaucaguu

SEQ ID NO: 6490 - RNA, 22 nt, Artificial Sequence
  Synthesized RNAi sequence
acccggguaagugguuauauaa

SEQ ID NO: 6491 - RNA, 22 nt, Artificial Sequence
  Synthesized RNAi sequence
acccucuugaacaacaucaccc

SEQ ID NO: 6492 - RNA, 22 nt, Artificial Sequence
  Synthesized RNAi sequence
acccucuuguauuuuaauaccc

SEQ ID NO: 6493 - RNA, 22 nt, Artificial Sequence
  Synthesized RNAi sequence
acccugacccggguaagugguu

SEQ ID NO: 6494 - RNA, 22 nt, Artificial Sequence
  Synthesized RNAi sequence
acccuuaaggguugucugcugu

SEQ ID NO: 6495 - RNA, 22 nt, Artificial Sequence
  Synthesized RNAi sequence
acccuuaagugcuaucuuuguu

SEQ ID NO: 6496 - RNA, 22 nt, Artificial Sequence
  Synthesized RNAi sequence
acccuuauauuuacgcuguaua

SEQ ID NO: 6497 - RNA, 22 nt, Artificial Sequence
  Synthesized RNAi sequence
acccuugccgagcugcugaaau

SEQ ID NO: 6498 - RNA, 22 nt, Artificial Sequence
  Synthesized RNAi sequence
accgacacucuuaacaguauuc

SEQ ID NO: 6499 - RNA, 22 nt, Artificial Sequence
  Synthesized RNAi sequence
accgagcagcuucuuccaaauu

SEQ ID NO: 6500 - RNA, 22 nt, Artificial Sequence
  Synthesized RNAi sequence
accgaguucaacuguauaggca

SEQ ID NO: 6501 - RNA, 22 nt, Artificial Sequence
  Synthesized RNAi sequence
accgucuacaacaugcacauaa

SEQ ID NO: 6502 - RNA, 22 nt, Artificial Sequence
  Synthesized RNAi sequence
accgucuaugcaauacaaaguu

SEQ ID NO: 6503 - RNA, 22 nt, Artificial Sequence
  Synthesized RNAi sequence
accguguaacuauguuaguagu

SEQ ID NO: 6504 - RNA, 22 nt, Artificial Sequence
  Synthesized RNAi sequence
accuaaagcagcgguugaguag

SEQ ID NO: 6505 - RNA, 22 nt, Artificial Sequence
  Synthesized RNAi sequence
accuaacucaccuacugucuua

SEQ ID NO: 6506 - RNA, 22 nt, Artificial Sequence
  Synthesized RNAi sequence
accuaauacucuagauaauuca

SEQ ID NO: 6507 - RNA, 22 nt, Artificial Sequence
  Synthesized RNAi sequence
accuacccagaaaacuaggauc

SEQ ID NO: 6508 - RNA, 22 nt, Artificial Sequence
  Synthesized RNAi sequence
accuacugucuuauuacaguag

SEQ ID NO: 6509 - RNA, 22 nt, Artificial Sequence
  Synthesized RNAi sequence
accuaguuguguagauugucca

SEQ ID NO: 6510 - RNA, 22 nt, Artificial Sequence
  Synthesized RNAi sequence
accuccauuagcauagacauaa

SEQ ID NO: 6511 - RNA, 22 nt, Artificial Sequence
  Synthesized RNAi sequence
accuccuccauguuuaagguaa

SEQ ID NO: 6512 - RNA, 22 nt, Artificial Sequence
  Synthesized RNAi sequence
accucucuuaagaaauucuaua

SEQ ID NO: 6513 - RNA, 22 nt, Artificial Sequence
  Synthesized RNAi sequence
accuuaauaguccucacuucuc

SEQ ID NO: 6514 - RNA, 22 nt, Artificial Sequence
  Synthesized RNAi sequence
accuucaugugaauuaugaggu

SEQ ID NO: 6515 - RNA, 22 nt, Artificial Sequence
  Synthesized RNAi sequence
accuugcacuucuaucacagug

SEQ ID NO: 6516 - RNA, 22 nt, Artificial Sequence
  Synthesized RNAi sequence
accuuuaguguuauuagcucuc

SEQ ID NO: 6517 - RNA, 22 nt, Artificial Sequence
  Synthesized RNAi sequence
accuuucuuaaauuguucauaa

SEQ ID NO: 6518 - RNA, 22 nt, Artificial Sequence
  Synthesized RNAi sequence
accuuuguauucugaggacuuu

SEQ ID NO: 6519 - RNA, 22 nt, Artificial Sequence
  Synthesized RNAi sequence
accuuuguuaacauuugggccg

SEQ ID NO: 6520 - RNA, 22 nt, Artificial Sequence
  Synthesized RNAi sequence
acgaauuugauguuucaacugg

SEQ ID NO: 6521 - RNA, 22 nt, Artificial Sequence
  Synthesized RNAi sequence
acgauguaagaagacuggucag

SEQ ID NO: 6522 - RNA, 22 nt, Artificial Sequence
  Synthesized RNAi sequence
acgcgcacuacagucaauacaa

SEQ ID NO: 6523 - RNA, 22 nt, Artificial Sequence
  Synthesized RNAi sequence
acgcuacaguuguuuuacuggu

SEQ ID NO: 6524 - RNA, 22 nt, Artificial Sequence
  Synthesized RNAi sequence
acgcugauuuugcagaugauuc

SEQ ID NO: 6525 - RNA, 22 nt, Artificial Sequence
  Synthesized RNAi sequence
acgcuguaacagcaucagguga

SEQ ID NO: 6526 - RNA, 22 nt, Artificial Sequence
  Synthesized RNAi sequence
acgcuguauaguugaaacuaug

SEQ ID NO: 6527 - RNA, 22 nt, Artificial Sequence
  Synthesized RNAi sequence
acggggugucauguuuucaacu

SEQ ID NO: 6528 - RNA, 22 nt, Artificial Sequence
  Synthesized RNAi sequence
acgguuuaaacaccguguaacu

SEQ ID NO: 6529 - RNA, 22 nt, Artificial Sequence
  Synthesized RNAi sequence
acguaagcaucaaacauuuuaa

SEQ ID NO: 6530 - RNA, 22 nt, Artificial Sequence
  Synthesized RNAi sequence
acguacaagguaucugaacacc

SEQ ID NO: 6531 - RNA, 22 nt, Artificial Sequence
  Synthesized RNAi sequence
acguagagugucaucauuaggu

SEQ ID NO: 6532 - RNA, 22 nt, Artificial Sequence
  Synthesized RNAi sequence
acguauacaccagguauuuggu

SEQ ID NO: 6533 - RNA, 22 nt, Artificial Sequence
  Synthesized RNAi sequence
acguauuaacguaagcaucaaa

SEQ ID NO: 6534 - RNA, 22 nt, Artificial Sequence
  Synthesized RNAi sequence
acgucuuucuguaugguaggau

SEQ ID NO: 6535 - RNA, 22 nt, Artificial Sequence
  Synthesized RNAi sequence
acguggcuuuauuaguugcauu

SEQ ID NO: 6536 - RNA, 22 nt, Artificial Sequence
  Synthesized RNAi sequence
acguucaagacucuuuugcaag

SEQ ID NO: 6537 - RNA, 22 nt, Artificial Sequence
  Synthesized RNAi sequence
acguuuguaacacaucauacaa

SEQ ID NO: 6538 - RNA, 22 nt, Artificial Sequence
  Synthesized RNAi sequence
acuaaaacuauucacuucaaua

SEQ ID NO: 6539 - RNA, 22 nt, Artificial Sequence
  Synthesized RNAi sequence
acuaacaacuuuguuaagaaaa

SEQ ID NO: 6540 - RNA, 22 nt, Artificial Sequence
  Synthesized RNAi sequence
acuaacaagaguggcagaaucu

SEQ ID NO: 6541 - RNA, 22 nt, Artificial Sequence
  Synthesized RNAi sequence
acuaagacaaacacuacaaggu

SEQ ID NO: 6542 - RNA, 22 nt, Artificial Sequence
  Synthesized RNAi sequence
acuaagccaaaagcaguuaaau

SEQ ID NO: 6543 - RNA, 22 nt, Artificial Sequence
  Synthesized RNAi sequence
acuaauaaauguacuaccagca

SEQ ID NO: 6544 - RNA, 22 nt, Artificial Sequence
  Synthesized RNAi sequence
acuaaugccugaucuaguaaca

SEQ ID NO: 6545 - RNA, 22 nt, Artificial Sequence
  Synthesized RNAi sequence
acuacaagguauagaaccagua

SEQ ID NO: 6546 - RNA, 22 nt, Artificial Sequence
  Synthesized RNAi sequence
acuacagucaauacaagcacca

SEQ ID NO: 6547 - RNA, 22 nt, Artificial Sequence
  Synthesized RNAi sequence
acuaccacccacuuuaaguggu

SEQ ID NO: 6548 - RNA, 22 nt, Artificial Sequence
  Synthesized RNAi sequence
acuaccagcacagaauguauca

SEQ ID NO: 6549 - RNA, 22 nt, Artificial Sequence
  Synthesized RNAi sequence
acuagaauugucuacauaagca

SEQ ID NO: 6550 - RNA, 22 nt, Artificial Sequence
  Synthesized RNAi sequence
acuagauauuuuguagcuuguu

SEQ ID NO: 6551 - RNA, 22 nt, Artificial Sequence
  Synthesized RNAi sequence
acuagcacaaguaaauguacca

SEQ ID NO: 6552 - RNA, 22 nt, Artificial Sequence
  Synthesized RNAi sequence
acuaggaucaguugugugguag

SEQ ID NO: 6553 - RNA, 22 nt, Artificial Sequence
  Synthesized RNAi sequence
acuaguguaauauacacuuuua

SEQ ID NO: 6554 - RNA, 22 nt, Artificial Sequence
  Synthesized RNAi sequence
acuauauauggagcaucuuucu

SEQ ID NO: 6555 - RNA, 22 nt, Artificial Sequence
  Synthesized RNAi sequence
acuaucaacgauguaagaagac

SEQ ID NO: 6556 - RNA, 22 nt, Artificial Sequence
  Synthesized RNAi sequence
acuaucaccaacaucagacacu

SEQ ID NO: 6557 - RNA, 22 nt, Artificial Sequence
  Synthesized RNAi sequence
acuaucaucaucuaaccaaucu

SEQ ID NO: 6558 - RNA, 22 nt, Artificial Sequence
  Synthesized RNAi sequence
acuaucgccaguaacuucuaug

SEQ ID NO: 6559 - RNA, 22 nt, Artificial Sequence
  Synthesized RNAi sequence
acuauggcuuuaguuuccacac

SEQ ID NO: 6560 - RNA, 22 nt, Artificial Sequence
  Synthesized RNAi sequence
acuauguuaguaguuguacuaa

SEQ ID NO: 6561 - RNA, 22 nt, Artificial Sequence
  Synthesized RNAi sequence
acuauuaacagcagcuaaacca

SEQ ID NO: 6562 - RNA, 22 nt, Artificial Sequence
  Synthesized RNAi sequence
acuauucacuucaauagucuga

SEQ ID NO: 6563 - RNA, 22 nt, Artificial Sequence
  Synthesized RNAi sequence
acucaaaagccucaacacguag

SEQ ID NO: 6564 - RNA, 22 nt, Artificial Sequence
  Synthesized RNAi sequence
acucaagaacgucuuucuguau

SEQ ID NO: 6565 - RNA, 22 nt, Artificial Sequence
  Synthesized RNAi sequence
acucaccagacucaucaaauaa

SEQ ID NO: 6566 - RNA, 22 nt, Artificial Sequence
  Synthesized RNAi sequence
acucaccuacugucuuauuaca

SEQ ID NO: 6567 - RNA, 22 nt, Artificial Sequence
  Synthesized RNAi sequence
acucacuagcacaaguaaaugu

SEQ ID NO: 6568 - RNA, 22 nt, Artificial Sequence
  Synthesized RNAi sequence
acucauauugaguugauggcuc

SEQ ID NO: 6569 - RNA, 22 nt, Artificial Sequence
  Synthesized RNAi sequence
acucaucaaauaaguaguaugu

SEQ ID NO: 6570 - RNA, 22 nt, Artificial Sequence
  Synthesized RNAi sequence
acucaucuaaaucaaugcccag

SEQ ID NO: 6571 - RNA, 22 nt, Artificial Sequence
  Synthesized RNAi sequence
acucauuguuucucuaacauca

SEQ ID NO: 6572 - RNA, 22 nt, Artificial Sequence
  Synthesized RNAi sequence
acucauuuacuucuguaccgag

SEQ ID NO: 6573 - RNA, 22 nt, Artificial Sequence
  Synthesized RNAi sequence
acuccacucaucuaaaucaaug

SEQ ID NO: 6574 - RNA, 22 nt, Artificial Sequence
  Synthesized RNAi sequence
acuccuguuguacuagauauuu

SEQ ID NO: 6575 - RNA, 22 nt, Artificial Sequence
  Synthesized RNAi sequence
acucuagauaauucauuagguu

SEQ ID NO: 6576 - RNA, 22 nt, Artificial Sequence
  Synthesized RNAi sequence
acucuauuuguuggaguguuaa

SEQ ID NO: 6577 - RNA, 22 nt, Artificial Sequence
  Synthesized RNAi sequence
acucuuaacaguauucuuugcu

SEQ ID NO: 6578 - RNA, 22 nt, Artificial Sequence
  Synthesized RNAi sequence
acucuuaagaaguugaaugucu

SEQ ID NO: 6579 - RNA, 22 nt, Artificial Sequence
  Synthesized RNAi sequence
acucuucuucuucacaaucacc

SEQ ID NO: 6580 - RNA, 22 nt, Artificial Sequence
  Synthesized RNAi sequence
acucuuguaaccuugcacuucu

SEQ ID NO: 6581 - RNA, 22 nt, Artificial Sequence
  Synthesized RNAi sequence
acucuuguugcucuauuacguu

SEQ ID NO: 6582 - RNA, 22 nt, Artificial Sequence
  Synthesized RNAi sequence
acucuuuugcaagaaucuaaau

SEQ ID NO: 6583 - RNA, 22 nt, Artificial Sequence
  Synthesized RNAi sequence
acugaagguuuacuuucaguua

SEQ ID NO: 6584 - RNA, 22 nt, Artificial Sequence
  Synthesized RNAi sequence
acugagcagguggugcugacau

SEQ ID NO: 6585 - RNA, 22 nt, Artificial Sequence
  Synthesized RNAi sequence
acugcaacuuccgcacuaucac

SEQ ID NO: 6586 - RNA, 22 nt, Artificial Sequence
  Synthesized RNAi sequence
acugccgucuuguugaccaaca

SEQ ID NO: 6587 - RNA, 22 nt, Artificial Sequence
  Synthesized RNAi sequence
acugcuucaaccaauuauuaac

SEQ ID NO: 6588 - RNA, 22 nt, Artificial Sequence
  Synthesized RNAi sequence
acugguaauuaccaguguacuc

SEQ ID NO: 6589 - RNA, 22 nt, Artificial Sequence
  Synthesized RNAi sequence
acuggucaguaggauuuauugg

SEQ ID NO: 6590 - RNA, 22 nt, Artificial Sequence
  Synthesized RNAi sequence
acugguguaaaaguaaaaucua

SEQ ID NO: 6591 - RNA, 22 nt, Artificial Sequence
  Synthesized RNAi sequence
acugguguaaguuccaucucua

SEQ ID NO: 6592 - RNA, 22 nt, Artificial Sequence
  Synthesized RNAi sequence
acugguuuuagaucuucgcagg

SEQ ID NO: 6593 - RNA, 22 nt, Artificial Sequence
  Synthesized RNAi sequence
acugguuuuaugguuguugugu

SEQ ID NO: 6594 - RNA, 22 nt, Artificial Sequence
  Synthesized RNAi sequence
acugguuuugugcuccaaagac

SEQ ID NO: 6595 - RNA, 22 nt, Artificial Sequence
  Synthesized RNAi sequence
acuguaacacuaucaacgaugu

SEQ ID NO: 6596 - RNA, 22 nt, Artificial Sequence
  Synthesized RNAi sequence
acuguagcuggcacuuugagag

SEQ ID NO: 6597 - RNA, 22 nt, Artificial Sequence
  Synthesized RNAi sequence
acuguaguaaacagacgcugau

SEQ ID NO: 6598 - RNA, 22 nt, Artificial Sequence
  Synthesized RNAi sequence
acuguagugacaagucucucgc

SEQ ID NO: 6599 - RNA, 22 nt, Artificial Sequence
  Synthesized RNAi sequence
acuguauaggcagagcacuucu

SEQ ID NO: 6600 - RNA, 22 nt, Artificial Sequence
  Synthesized RNAi sequence
acugucuuauuacaguaggcua

SEQ ID NO: 6601 - RNA, 22 nt, Artificial Sequence
  Synthesized RNAi sequence
acuguuguaaacaccuuaauag

SEQ ID NO: 6602 - RNA, 22 nt, Artificial Sequence
  Synthesized RNAi sequence
acuguuguccauaugucauuga

SEQ ID NO: 6603 - RNA, 22 nt, Artificial Sequence
  Synthesized RNAi sequence
acuguuuucuuuguagaaaaca

SEQ ID NO: 6604 - RNA, 22 nt, Artificial Sequence
  Synthesized RNAi sequence
acuuaaaauuaucgaagcuugc

SEQ ID NO: 6605 - RNA, 22 nt, Artificial Sequence
  Synthesized RNAi sequence
acuuagggucaauuucuguaca

SEQ ID NO: 6606 - RNA, 22 nt, Artificial Sequence
  Synthesized RNAi sequence
acuuaguuucuuccagaguugu

SEQ ID NO: 6607 - RNA, 22 nt, Artificial Sequence
  Synthesized RNAi sequence
acuucaacucuauuuguuggag

SEQ ID NO: 6608 - RNA, 22 nt, Artificial Sequence
  Synthesized RNAi sequence
acuucaauagucugaacaacug

SEQ ID NO: 6609 - RNA, 22 nt, Artificial Sequence
  Synthesized RNAi sequence
acuucaguacaucaaacgaauu

SEQ ID NO: 6610 - RNA, 22 nt, Artificial Sequence
  Synthesized RNAi sequence
acuucaucacuaauaaauguac

SEQ ID NO: 6611 - RNA, 22 nt, Artificial Sequence
  Synthesized RNAi sequence
acuuccgcacuaucaccaacau

SEQ ID NO: 6612 - RNA, 22 nt, Artificial Sequence
  Synthesized RNAi sequence
acuuccucuuuaggaaucucag

SEQ ID NO: 6613 - RNA, 22 nt, Artificial Sequence
  Synthesized RNAi sequence
acuucgguaguuuucacauuac

SEQ ID NO: 6614 - RNA, 22 nt, Artificial Sequence
  Synthesized RNAi sequence
acuucuaucacagugucaucac

SEQ ID NO: 6615 - RNA, 22 nt, Artificial Sequence
  Synthesized RNAi sequence
acuucuaugucagauugaugug

SEQ ID NO: 6616 - RNA, 22 nt, Artificial Sequence
  Synthesized RNAi sequence
acuucucauuaaguacuuuauc

SEQ ID NO: 6617 - RNA, 22 nt, Artificial Sequence
  Synthesized RNAi sequence
acuucucucaaagaaagaagug

SEQ ID NO: 6618 - RNA, 22 nt, Artificial Sequence
  Synthesized RNAi sequence
acuucuguaccgaguucaacug

SEQ ID NO: 6619 - RNA, 22 nt, Artificial Sequence
  Synthesized RNAi sequence
acuucuucaacacaagcuuuga

SEQ ID NO: 6620 - RNA, 22 nt, Artificial Sequence
  Synthesized RNAi sequence
acuucuucagagacugguuuua

SEQ ID NO: 6621 - RNA, 22 nt, Artificial Sequence
  Synthesized RNAi sequence
acuugcauggcauuguuaguag

SEQ ID NO: 6622 - RNA, 22 nt, Artificial Sequence
  Synthesized RNAi sequence
acuugcguguggagguuaaugu

SEQ ID NO: 6623 - RNA, 22 nt, Artificial Sequence
  Synthesized RNAi sequence
acuugucuaguaguugcacaug

SEQ ID NO: 6624 - RNA, 22 nt, Artificial Sequence
  Synthesized RNAi sequence
acuuuaagugguccauuaguag

SEQ ID NO: 6625 - RNA, 22 nt, Artificial Sequence
  Synthesized RNAi sequence
acuuuaucaauccuuucaucaa

SEQ ID NO: 6626 - RNA, 22 nt, Artificial Sequence
  Synthesized RNAi sequence
acuuucaguuauaaauggcuua

SEQ ID NO: 6627 - RNA, 22 nt, Artificial Sequence
  Synthesized RNAi sequence
acuuugagagaucucauauacc

SEQ ID NO: 6628 - RNA, 22 nt, Artificial Sequence
  Synthesized RNAi sequence
acuuuguaaguaaagcaccguc

SEQ ID NO: 6629 - RNA, 22 nt, Artificial Sequence
  Synthesized RNAi sequence
acuuuguuaagaaaaggcuuag

SEQ ID NO: 6630 - RNA, 22 nt, Artificial Sequence
  Synthesized RNAi sequence
acuuuguuauaggugagcauau

SEQ ID NO: 6631 - RNA, 22 nt, Artificial Sequence
  Synthesized RNAi sequence
acuuuuaucaccucucuuaaga

SEQ ID NO: 6632 - RNA, 22 nt, Artificial Sequence
  Synthesized RNAi sequence
acuuuuccauacauaauaaaau

SEQ ID NO: 6633 - RNA, 22 nt, Artificial Sequence
  Synthesized RNAi sequence
acuuuucucaaagcuuucgcua

SEQ ID NO: 6634 - RNA, 22 nt, Artificial Sequence
  Synthesized RNAi sequence
agaaaacauccguaauaggacc

SEQ ID NO: 6635 - RNA, 22 nt, Artificial Sequence
  Synthesized RNAi sequence
agaaaaggcuuagcauaauuag

SEQ ID NO: 6636 - RNA, 22 nt, Artificial Sequence
  Synthesized RNAi sequence
agaaacagaaacuguagcuggc

SEQ ID NO: 6637 - RNA, 22 nt, Artificial Sequence
  Synthesized RNAi sequence
agaaacaguuccaagaauuucu

SEQ ID NO: 6638 - RNA, 22 nt, Artificial Sequence
  Synthesized RNAi sequence
agaaacuguagcuggcacuuug

SEQ ID NO: 6639 - RNA, 22 nt, Artificial Sequence
  Synthesized RNAi sequence
agaaagaacaauacauauguga

SEQ ID NO: 6640 - RNA, 22 nt, Artificial Sequence
  Synthesized RNAi sequence
agaaagaagugucuuaagauug

SEQ ID NO: 6641 - RNA, 22 nt, Artificial Sequence
  Synthesized RNAi sequence
agaaagugaugucaaugucacu

SEQ ID NO: 6642 - RNA, 22 nt, Artificial Sequence
  Synthesized RNAi sequence
agaaagugugcccauguacaua

SEQ ID NO: 6643 - RNA, 22 nt, Artificial Sequence
  Synthesized RNAi sequence
agaaauaaggcauauaauuagu

SEQ ID NO: 6644 - RNA, 22 nt, Artificial Sequence
  Synthesized RNAi sequence
agaaauucuauaccuaguugug

SEQ ID NO: 6645 - RNA, 22 nt, Artificial Sequence
  Synthesized RNAi sequence
agaacaauacauaugugaagcc

SEQ ID NO: 6646 - RNA, 22 nt, Artificial Sequence
  Synthesized RNAi sequence
agaaccaguacaguagguugca

SEQ ID NO: 6647 - RNA, 22 nt, Artificial Sequence
  Synthesized RNAi sequence
agaacgucuuucuguaugguag

SEQ ID NO: 6648 - RNA, 22 nt, Artificial Sequence
  Synthesized RNAi sequence
agaacuucgugcugauuaaaau

SEQ ID NO: 6649 - RNA, 22 nt, Artificial Sequence
  Synthesized RNAi sequence
agaagaagaaguaagauaacca

SEQ ID NO: 6650 - RNA, 22 nt, Artificial Sequence
  Synthesized RNAi sequence
agaagaaguaagauaaccauua

SEQ ID NO: 6651 - RNA, 22 nt, Artificial Sequence
  Synthesized RNAi sequence
agaagacuggucaguaggauuu

SEQ ID NO: 6652 - RNA, 22 nt, Artificial Sequence
  Synthesized RNAi sequence
agaagauguacauucuaaccau

SEQ ID NO: 6653 - RNA, 22 nt, Artificial Sequence
  Synthesized RNAi sequence
agaaggauaggugucuaaagaa

SEQ ID NO: 6654 - RNA, 22 nt, Artificial Sequence
  Synthesized RNAi sequence
agaaggcaugccuaaauuagac

SEQ ID NO: 6655 - RNA, 22 nt, Artificial Sequence
  Synthesized RNAi sequence
agaaguaagauaaccauuauac

SEQ ID NO: 6656 - RNA, 22 nt, Artificial Sequence
  Synthesized RNAi sequence
agaaguggcaccaaauuccaaa

SEQ ID NO: 6657 - RNA, 22 nt, Artificial Sequence
  Synthesized RNAi sequence
agaagugucuuaagauugucaa

SEQ ID NO: 6658 - RNA, 22 nt, Artificial Sequence
  Synthesized RNAi sequence
agaaguuaaaccauuaacuugu

SEQ ID NO: 6659 - RNA, 22 nt, Artificial Sequence
  Synthesized RNAi sequence
agaaguuauauguuuauaguga

SEQ ID NO: 6660 - RNA, 22 nt, Artificial Sequence
  Synthesized RNAi sequence
agaaguugaaugucuucaccuu

SEQ ID NO: 6661 - RNA, 22 nt, Artificial Sequence
  Synthesized RNAi sequence
agaauaggaccaaucuuuauag

SEQ ID NO: 6662 - RNA, 22 nt, Artificial Sequence
  Synthesized RNAi sequence
agaaucuaaaccacuaagacaa

SEQ ID NO: 6663 - RNA, 22 nt, Artificial Sequence
  Synthesized RNAi sequence
agaaucuaaauuggcauguuga

SEQ ID NO: 6664 - RNA, 22 nt, Artificial Sequence
  Synthesized RNAi sequence
agaaugucuuucauaagucuuu

SEQ ID NO: 6665 - RNA, 22 nt, Artificial Sequence
  Synthesized RNAi sequence
agaauuacuaauaaaauguacu

SEQ ID NO: 6666 - RNA, 22 nt, Artificial Sequence
  Synthesized RNAi sequence
agaauugucuacauaagcagcc

SEQ ID NO: 6667 - RNA, 22 nt, Artificial Sequence
  Synthesized RNAi sequence
agaauugucuuucuuauaauaa

SEQ ID NO: 6668 - RNA, 22 nt, Artificial Sequence
  Synthesized RNAi sequence
agaauuucuugcuucucauuag

SEQ ID NO: 6669 - RNA, 22 nt, Artificial Sequence
  Synthesized RNAi sequence
agacaaaauuuaccgacacucu

SEQ ID NO: 6670 - RNA, 22 nt, Artificial Sequence
  Synthesized RNAi sequence
agacaaacacuacaagguauag

SEQ ID NO: 6671 - RNA, 22 nt, Artificial Sequence
  Synthesized RNAi sequence
agacaacguauacaccagguau

SEQ ID NO: 6672 - RNA, 22 nt, Artificial Sequence
  Synthesized RNAi sequence
agacaaugacaugaaaucuuua

SEQ ID NO: 6673 - RNA, 22 nt, Artificial Sequence
  Synthesized RNAi sequence
agacacuaaugccugaucuagu

SEQ ID NO: 6674 - RNA, 22 nt, Artificial Sequence
  Synthesized RNAi sequence
agacaggcauuaauuugcgugu

SEQ ID NO: 6675 - RNA, 22 nt, Artificial Sequence
  Synthesized RNAi sequence
agacaguguuuagcaagauugu

SEQ ID NO: 6676 - RNA, 22 nt, Artificial Sequence
  Synthesized RNAi sequence
agacauaaaaggaccuucuaac

SEQ ID NO: 6677 - RNA, 22 nt, Artificial Sequence
  Synthesized RNAi sequence
agacauuaaaacaccuaaagca

SEQ ID NO: 6678 - RNA, 22 nt, Artificial Sequence
  Synthesized RNAi sequence
agacauucaacaacaucuuuag

SEQ ID NO: 6679 - RNA, 22 nt, Artificial Sequence
  Synthesized RNAi sequence
agacauugucuaaggacacauu

SEQ ID NO: 6680 - RNA, 22 nt, Artificial Sequence
  Synthesized RNAi sequence
agacauuugugcgaacaguauc

SEQ ID NO: 6681 - RNA, 22 nt, Artificial Sequence
  Synthesized RNAi sequence
agacgcugauuuugcagaugau

SEQ ID NO: 6682 - RNA, 22 nt, Artificial Sequence
  Synthesized RNAi sequence
agacuagaauugucuacauaag

SEQ ID NO: 6683 - RNA, 22 nt, Artificial Sequence
  Synthesized RNAi sequence
agacucaucaaauaaguaguau

SEQ ID NO: 6684 - RNA, 22 nt, Artificial Sequence
  Synthesized RNAi sequence
agacucuuuugcaagaaucuaa

SEQ ID NO: 6685 - RNA, 22 nt, Artificial Sequence
  Synthesized RNAi sequence
agacuggucaguaggauuuauu

SEQ ID NO: 6686 - RNA, 22 nt, Artificial Sequence
  Synthesized RNAi sequence
agacugguuuuagaucuucgca

SEQ ID NO: 6687 - RNA, 22 nt, Artificial Sequence
  Synthesized RNAi sequence
agagaaugucuuucauaagucu

SEQ ID NO: 6688 - RNA, 22 nt, Artificial Sequence
  Synthesized RNAi sequence
agagacugguuuuagaucuucg

SEQ ID NO: 6689 - RNA, 22 nt, Artificial Sequence
  Synthesized RNAi sequence
agagagaaugucuuucauaagu

SEQ ID NO: 6690 - RNA, 22 nt, Artificial Sequence
  Synthesized RNAi sequence
agagaucucauauaccgagcag

SEQ ID NO: 6691 - RNA, 22 nt, Artificial Sequence
  Synthesized RNAi sequence
agagcacuucucauuaaguacu

SEQ ID NO: 6692 - RNA, 22 nt, Artificial Sequence
  Synthesized RNAi sequence
agagcagcagaaguggcaccaa

SEQ ID NO: 6693 - RNA, 22 nt, Artificial Sequence
  Synthesized RNAi sequence
agagcagguggauuaaacuuca

SEQ ID NO: 6694 - RNA, 22 nt, Artificial Sequence
  Synthesized RNAi sequence
agaggguguguaguguuuauaa

SEQ ID NO: 6695 - RNA, 22 nt, Artificial Sequence
  Synthesized RNAi sequence
agaguggcagaaucuggaugaa

SEQ ID NO: 6696 - RNA, 22 nt, Artificial Sequence
  Synthesized RNAi sequence
agagugucaucauuagguaaaa

SEQ ID NO: 6697 - RNA, 22 nt, Artificial Sequence
  Synthesized RNAi sequence
agaguucaaauagccuucucug

SEQ ID NO: 6698 - RNA, 22 nt, Artificial Sequence
  Synthesized RNAi sequence
agaguuguuguaacuucuucaa

SEQ ID NO: 6699 - RNA, 22 nt, Artificial Sequence
  Synthesized RNAi sequence
agaguuucauuuagaucguuaa

SEQ ID NO: 6700 - RNA, 22 nt, Artificial Sequence
  Synthesized RNAi sequence
agauaacaguuguuaucugccc

SEQ ID NO: 6701 - RNA, 22 nt, Artificial Sequence
  Synthesized RNAi sequence
agauaaccauuauacgcuguaa

SEQ ID NO: 6702 - RNA, 22 nt, Artificial Sequence
  Synthesized RNAi sequence
agauaagacauugucuaaggac

SEQ ID NO: 6703 - RNA, 22 nt, Artificial Sequence
  Synthesized RNAi sequence
agauaagugcacaaaaguuagc

SEQ ID NO: 6704 - RNA, 22 nt, Artificial Sequence
  Synthesized RNAi sequence
agauaauagaugguagaaugua

SEQ ID NO: 6705 - RNA, 22 nt, Artificial Sequence
  Synthesized RNAi sequence
agauauuuuguagcuuguuuac

SEQ ID NO: 6706 - RNA, 22 nt, Artificial Sequence
  Synthesized RNAi sequence
agaucguuaaguguguugauaa

SEQ ID NO: 6707 - RNA, 22 nt, Artificial Sequence
  Synthesized RNAi sequence
agaucucauauaccgagcagcu

SEQ ID NO: 6708 - RNA, 22 nt, Artificial Sequence
  Synthesized RNAi sequence
agaucuucgcaggcaagauuau

SEQ ID NO: 6709 - RNA, 22 nt, Artificial Sequence
  Synthesized RNAi sequence
agaugaaaugguaauuuguaua

SEQ ID NO: 6710 - RNA, 22 nt, Artificial Sequence
  Synthesized RNAi sequence
agaugcuuuaauucuagaauuu

SEQ ID NO: 6711 - RNA, 22 nt, Artificial Sequence
  Synthesized RNAi sequence
agauggauggaaccauucuuca

SEQ ID NO: 6712 - RNA, 22 nt, Artificial Sequence
  Synthesized RNAi sequence
agauguacauucuaaccauagc

SEQ ID NO: 6713 - RNA, 22 nt, Artificial Sequence
  Synthesized RNAi sequence
agauuauccauucccugcgcgu

SEQ ID NO: 6714 - RNA, 22 nt, Artificial Sequence
  Synthesized RNAi sequence
agauucaacuugcauggcauug

SEQ ID NO: 6715 - RNA, 22 nt, Artificial Sequence
  Synthesized RNAi sequence
agauugaugugacaauuuaaga

SEQ ID NO: 6716 - RNA, 22 nt, Artificial Sequence
  Synthesized RNAi sequence
agauugccauuaaugucaauau

SEQ ID NO: 6717 - RNA, 22 nt, Artificial Sequence
  Synthesized RNAi sequence
agauugucaaaggugauaacuu

SEQ ID NO: 6718 - RNA, 22 nt, Artificial Sequence
  Synthesized RNAi sequence
agauuguccagaauaggaccaa

SEQ ID NO: 6719 - RNA, 22 nt, Artificial Sequence
  Synthesized RNAi sequence
agauuguguccgcuuaaaacac

SEQ ID NO: 6720 - RNA, 22 nt, Artificial Sequence
  Synthesized RNAi sequence
agcaaauuugauauuaucacau

SEQ ID NO: 6721 - RNA, 22 nt, Artificial Sequence
  Synthesized RNAi sequence
agcaagauuguguccgcuuaaa

SEQ ID NO: 6722 - RNA, 22 nt, Artificial Sequence
  Synthesized RNAi sequence
agcaaggguuuucaaaccuaau

SEQ ID NO: 6723 - RNA, 22 nt, Artificial Sequence
  Synthesized RNAi sequence
agcaagugagaugguuucaaua

SEQ ID NO: 6724 - RNA, 22 nt, Artificial Sequence
  Synthesized RNAi sequence
agcacaaguaaauguaccaugc

SEQ ID NO: 6725 - RNA, 22 nt, Artificial Sequence
  Synthesized RNAi sequence
agcaccauaaucaaccacaccc

SEQ ID NO: 6726 - RNA, 22 nt, Artificial Sequence
  Synthesized RNAi sequence
agcagaaguggcaccaaauucc

SEQ ID NO: 6727 - RNA, 22 nt, Artificial Sequence
  Synthesized RNAi sequence
agcagcagaaguggcaccaaau

SEQ ID NO: 6728 - RNA, 22 nt, Artificial Sequence
  Synthesized RNAi sequence
agcagccauuagaucugugugg

SEQ ID NO: 6729 - RNA, 22 nt, Artificial Sequence
  Synthesized RNAi sequence
agcagcgguugaguagauuaaa

SEQ ID NO: 6730 - RNA, 22 nt, Artificial Sequence
  Synthesized RNAi sequence
agcagcuucaccagcccuugcu

SEQ ID NO: 6731 - RNA, 22 nt, Artificial Sequence
  Synthesized RNAi sequence
agcagcuucuuccaaauuuaag

SEQ ID NO: 6732 - RNA, 22 nt, Artificial Sequence
  Synthesized RNAi sequence
agcagguggauuaaacuucaac

SEQ ID NO: 6733 - RNA, 22 nt, Artificial Sequence
  Synthesized RNAi sequence
agcagguuucuuauaaccaguu

SEQ ID NO: 6734 - RNA, 22 nt, Artificial Sequence
  Synthesized RNAi sequence
agcaguuaaaacacccucuuga

SEQ ID NO: 6735 - RNA, 22 nt, Artificial Sequence
  Synthesized RNAi sequence
agcaguuaaaucccauuuaaaa

SEQ ID NO: 6736 - RNA, 22 nt, Artificial Sequence
  Synthesized RNAi sequence
agcauaauuagcuauaguaucc

SEQ ID NO: 6737 - RNA, 22 nt, Artificial Sequence
  Synthesized RNAi sequence
agcauagacauaaaaggaccuu

SEQ ID NO: 6738 - RNA, 22 nt, Artificial Sequence
  Synthesized RNAi sequence
agcauauaguuauuacaacuau

SEQ ID NO: 6739 - RNA, 22 nt, Artificial Sequence
  Synthesized RNAi sequence
agcaucaaacauuuuaacugca

SEQ ID NO: 6740 - RNA, 22 nt, Artificial Sequence
  Synthesized RNAi sequence
agcaucuuguagagcaggugga

SEQ ID NO: 6741 - RNA, 22 nt, Artificial Sequence
  Synthesized RNAi sequence
agcaucuuucuuuaagaaagug

SEQ ID NO: 6742 - RNA, 22 nt, Artificial Sequence
  Synthesized RNAi sequence
agcauuucucgcaaauuccaag

SEQ ID NO: 6743 - RNA, 22 nt, Artificial Sequence
  Synthesized RNAi sequence
agccaaaagcaguuaaauccca

SEQ ID NO: 6744 - RNA, 22 nt, Artificial Sequence
  Synthesized RNAi sequence
agccaagaauuacuaauaaaau

SEQ ID NO: 6745 - RNA, 22 nt, Artificial Sequence
  Synthesized RNAi sequence
agccaaguggcauuguaacaag

SEQ ID NO: 6746 - RNA, 22 nt, Artificial Sequence
  Synthesized RNAi sequence
agccaauuuaaacucaccagac

SEQ ID NO: 6747 - RNA, 22 nt, Artificial Sequence
  Synthesized RNAi sequence
agccauacuccacucaucuaaa

SEQ ID NO: 6748 - RNA, 22 nt, Artificial Sequence
  Synthesized RNAi sequence
agccauguguuacauagccaag

SEQ ID NO: 6749 - RNA, 22 nt, Artificial Sequence
  Synthesized RNAi sequence
agccauuagaucuguguggcca

SEQ ID NO: 6750 - RNA, 22 nt, Artificial Sequence
  Synthesized RNAi sequence
agcccuugcucuguaauaagca

SEQ ID NO: 6751 - RNA, 22 nt, Artificial Sequence
  Synthesized RNAi sequence
agccucaacacguagaguguca

SEQ ID NO: 6752 - RNA, 22 nt, Artificial Sequence
  Synthesized RNAi sequence
agccucuagacaaaauuuaccg

SEQ ID NO: 6753 - RNA, 22 nt, Artificial Sequence
  Synthesized RNAi sequence
agccuuauuuaaggcuccugca

SEQ ID NO: 6754 - RNA, 22 nt, Artificial Sequence
  Synthesized RNAi sequence
agccuucucuguaaccaguaca

SEQ ID NO: 6755 - RNA, 22 nt, Artificial Sequence
  Synthesized RNAi sequence
agccuuuaccuccauuagcaua

SEQ ID NO: 6756 - RNA, 22 nt, Artificial Sequence
  Synthesized RNAi sequence
agcgaucuuuuguucaacuugc

SEQ ID NO: 6757 - RNA, 22 nt, Artificial Sequence
  Synthesized RNAi sequence
agcgguugaguagauuaaagaa

SEQ ID NO: 6758 - RNA, 22 nt, Artificial Sequence
  Synthesized RNAi sequence
agcuaaaccaugaguagcaagg

SEQ ID NO: 6759 - RNA, 22 nt, Artificial Sequence
  Synthesized RNAi sequence
agcuauaguaucccaagggaca

SEQ ID NO: 6760 - RNA, 22 nt, Artificial Sequence
  Synthesized RNAi sequence
agcuauguaaucaucagauuca

SEQ ID NO: 6761 - RNA, 22 nt, Artificial Sequence
  Synthesized RNAi sequence
agcuccauccaaauaaguugga

SEQ ID NO: 6762 - RNA, 22 nt, Artificial Sequence
  Synthesized RNAi sequence
agcuccuuucuuaaaagagggu

SEQ ID NO: 6763 - RNA, 22 nt, Artificial Sequence
  Synthesized RNAi sequence
agcucucagguugucuaaguua

SEQ ID NO: 6764 - RNA, 22 nt, Artificial Sequence
  Synthesized RNAi sequence
agcucucuugaagcagguuucu

SEQ ID NO: 6765 - RNA, 22 nt, Artificial Sequence
  Synthesized RNAi sequence
agcugaaaucggggccauuugu

SEQ ID NO: 6766 - RNA, 22 nt, Artificial Sequence
  Synthesized RNAi sequence
agcugacuguaguaaacagacg

SEQ ID NO: 6767 - RNA, 22 nt, Artificial Sequence
  Synthesized RNAi sequence
agcugcugaaauaaaaguagau

SEQ ID NO: 6768 - RNA, 22 nt, Artificial Sequence
  Synthesized RNAi sequence
agcuggcacuuugagagaucuc

SEQ ID NO: 6769 - RNA, 22 nt, Artificial Sequence
  Synthesized RNAi sequence
agcuucaccagcccuugcucug

SEQ ID NO: 6770 - RNA, 22 nt, Artificial Sequence
  Synthesized RNAi sequence
agcuucuacacccuuaaggguu

SEQ ID NO: 6771 - RNA, 22 nt, Artificial Sequence
  Synthesized RNAi sequence
agcuucuuccaaauuuaagcca

SEQ ID NO: 6772 - RNA, 22 nt, Artificial Sequence
  Synthesized RNAi sequence
agcuugcguuuggauaugguug

SEQ ID NO: 6773 - RNA, 22 nt, Artificial Sequence
  Synthesized RNAi sequence
agcuuguuuaccacacguacaa

SEQ ID NO: 6774 - RNA, 22 nt, Artificial Sequence
  Synthesized RNAi sequence
agcuuuaucaaaguaaagaugg

SEQ ID NO: 6775 - RNA, 22 nt, Artificial Sequence
  Synthesized RNAi sequence
agcuuucgcuagcauuucagua

SEQ ID NO: 6776 - RNA, 22 nt, Artificial Sequence
  Synthesized RNAi sequence
agcuuugauuuucuuaucaucu

SEQ ID NO: 6777 - RNA, 22 nt, Artificial Sequence
  Synthesized RNAi sequence
aggaaccagcaagugagauggu

SEQ ID NO: 6778 - RNA, 22 nt, Artificial Sequence
  Synthesized RNAi sequence
aggaacuuaguuucuuccagag

SEQ ID NO: 6779 - RNA, 22 nt, Artificial Sequence
  Synthesized RNAi sequence
aggaaucucagcgaucuuuugu

SEQ ID NO: 6780 - RNA, 22 nt, Artificial Sequence
  Synthesized RNAi sequence
aggacacauucuuugcaaguuc

SEQ ID NO: 6781 - RNA, 22 nt, Artificial Sequence
  Synthesized RNAi sequence
aggaccaaucuuuauaggaacc

SEQ ID NO: 6782 - RNA, 22 nt, Artificial Sequence
  Synthesized RNAi sequence
aggaccuucuaacaccauuaac

SEQ ID NO: 6783 - RNA, 22 nt, Artificial Sequence
  Synthesized RNAi sequence
aggaccuuuguauucugaggac

SEQ ID NO: 6784 - RNA, 22 nt, Artificial Sequence
  Synthesized RNAi sequence
aggacuuuguaaguaaagcacc

SEQ ID NO: 6785 - RNA, 22 nt, Artificial Sequence
  Synthesized RNAi sequence
aggauaggugucuaaagaaucu

SEQ ID NO: 6786 - RNA, 22 nt, Artificial Sequence
  Synthesized RNAi sequence
aggaucaguugugugguaguac

SEQ ID NO: 6787 - RNA, 22 nt, Artificial Sequence
  Synthesized RNAi sequence
aggauuacuaguguaauauaca

SEQ ID NO: 6788 - RNA, 22 nt, Artificial Sequence
  Synthesized RNAi sequence
aggauuuauuggucuuuuaaac

SEQ ID NO: 6789 - RNA, 22 nt, Artificial Sequence
  Synthesized RNAi sequence
aggauuuuccacuacuucuuca

SEQ ID NO: 6790 - RNA, 22 nt, Artificial Sequence
  Synthesized RNAi sequence
aggcaagauuauccauucccug

SEQ ID NO: 6791 - RNA, 22 nt, Artificial Sequence
  Synthesized RNAi sequence
aggcaaugaaccuuuaguguua

SEQ ID NO: 6792 - RNA, 22 nt, Artificial Sequence
  Synthesized RNAi sequence
aggcagagcacuucucauuaag

SEQ ID NO: 6793 - RNA, 22 nt, Artificial Sequence
  Synthesized RNAi sequence
aggcauauaauuaguacaaaca

SEQ ID NO: 6794 - RNA, 22 nt, Artificial Sequence
  Synthesized RNAi sequence
aggcaugccuaaauuagacauu

SEQ ID NO: 6795 - RNA, 22 nt, Artificial Sequence
  Synthesized RNAi sequence
aggcauuaauuugcguguuucu

SEQ ID NO: 6796 - RNA, 22 nt, Artificial Sequence
  Synthesized RNAi sequence
aggcgaacucauuuacuucugu

SEQ ID NO: 6797 - RNA, 22 nt, Artificial Sequence
  Synthesized RNAi sequence
aggcuaagauaagugcacaaaa

SEQ ID NO: 6798 - RNA, 22 nt, Artificial Sequence
  Synthesized RNAi sequence
aggcuuagcauaauuagcuaua

SEQ ID NO: 6799 - RNA, 22 nt, Artificial Sequence
  Synthesized RNAi sequence
agggacacuauuaacagcagcu

SEQ ID NO: 6800 - RNA, 22 nt, Artificial Sequence
  Synthesized RNAi sequence
aggguagaaagaacaauacaua

SEQ ID NO: 6801 - RNA, 22 nt, Artificial Sequence
  Synthesized RNAi sequence
agggucaauuucuguacaaaca

SEQ ID NO: 6802 - RNA, 22 nt, Artificial Sequence
  Synthesized RNAi sequence
aggguguguaguguuuauaauc

SEQ ID NO: 6803 - RNA, 22 nt, Artificial Sequence
  Synthesized RNAi sequence
aggguuuucaaaccuaauacuc

SEQ ID NO: 6804 - RNA, 22 nt, Artificial Sequence
  Synthesized RNAi sequence
agguaaaacauaaaauguuuua

SEQ ID NO: 6805 - RNA, 22 nt, Artificial Sequence
  Synthesized RNAi sequence
agguaaacauuggcugcauuaa

SEQ ID NO: 6806 - RNA, 22 nt, Artificial Sequence
  Synthesized RNAi sequence
agguauagaaccaguacaguag

SEQ ID NO: 6807 - RNA, 22 nt, Artificial Sequence
  Synthesized RNAi sequence
agguaucugaacaccuuucuua

SEQ ID NO: 6808 - RNA, 22 nt, Artificial Sequence
  Synthesized RNAi sequence
agguauuugguuuauacguggc

SEQ ID NO: 6809 - RNA, 22 nt, Artificial Sequence
  Synthesized RNAi sequence
aggugaagaaacagaaacugua

SEQ ID NO: 6810 - RNA, 22 nt, Artificial Sequence
  Synthesized RNAi sequence
aggugacuccuguuguacuaga

SEQ ID NO: 6811 - RNA, 22 nt, Artificial Sequence
  Synthesized RNAi sequence
aggugagcauauaguuauuaca

SEQ ID NO: 6812 - RNA, 22 nt, Artificial Sequence
  Synthesized RNAi sequence
aggugauaacuucaccaucuag

SEQ ID NO: 6813 - RNA, 22 nt, Artificial Sequence
  Synthesized RNAi sequence
agguggaaugugguaggauuac

SEQ ID NO: 6814 - RNA, 22 nt, Artificial Sequence
  Synthesized RNAi sequence
agguggauuaaacuucaacucu

SEQ ID NO: 6815 - RNA, 22 nt, Artificial Sequence
  Synthesized RNAi sequence
aggugucuaaagaaucuaaacc

SEQ ID NO: 6816 - RNA, 22 nt, Artificial Sequence
  Synthesized RNAi sequence
agguuaauguugucuacuguug

SEQ ID NO: 6817 - RNA, 22 nt, Artificial Sequence
  Synthesized RNAi sequence
agguugaagagcagcagaagug

SEQ ID NO: 6818 - RNA, 22 nt, Artificial Sequence
  Synthesized RNAi sequence
agguugacacauaagcugacug

SEQ ID NO: 6819 - RNA, 22 nt, Artificial Sequence
  Synthesized RNAi sequence
agguugcaauagugacauuagu

SEQ ID NO: 6820 - RNA, 22 nt, Artificial Sequence
  Synthesized RNAi sequence
agguugucuaaguuaacaaaau

SEQ ID NO: 6821 - RNA, 22 nt, Artificial Sequence
  Synthesized RNAi sequence
agguuuaccuugguaaucaucu

SEQ ID NO: 6822 - RNA, 22 nt, Artificial Sequence
  Synthesized RNAi sequence
agguuuacuuucaguuauaaau

SEQ ID NO: 6823 - RNA, 22 nt, Artificial Sequence
  Synthesized RNAi sequence
agguuuauguaacaauuuagcu

SEQ ID NO: 6824 - RNA, 22 nt, Artificial Sequence
  Synthesized RNAi sequence
agguuucuuaauaguaagacua

SEQ ID NO: 6825 - RNA, 22 nt, Artificial Sequence
  Synthesized RNAi sequence
agguuucuuauaaccaguuaac

SEQ ID NO: 6826 - RNA, 22 nt, Artificial Sequence
  Synthesized RNAi sequence
agguuuuauuuuaguaacauca

SEQ ID NO: 6827 - RNA, 22 nt, Artificial Sequence
  Synthesized RNAi sequence
aguaaaaucuagcaccauaauc

SEQ ID NO: 6828 - RNA, 22 nt, Artificial Sequence
  Synthesized RNAi sequence
aguaaacagacgcugauuuugc

SEQ ID NO: 6829 - RNA, 22 nt, Artificial Sequence
  Synthesized RNAi sequence
aguaaagaaauaaggcauauaa

SEQ ID NO: 6830 - RNA, 22 nt, Artificial Sequence
  Synthesized RNAi sequence
aguaaagauggauggaaccauu

SEQ ID NO: 6831 - RNA, 22 nt, Artificial Sequence
  Synthesized RNAi sequence
aguaaauguaccaugcuuaagu

SEQ ID NO: 6832 - RNA, 22 nt, Artificial Sequence
  Synthesized RNAi sequence
aguaacaaguuuucugugagga

SEQ ID NO: 6833 - RNA, 22 nt, Artificial Sequence
  Synthesized RNAi sequence
aguaacaguauagguugacaca

SEQ ID NO: 6834 - RNA, 22 nt, Artificial Sequence
  Synthesized RNAi sequence
aguaacaucagcuccauccaaa

SEQ ID NO: 6835 - RNA, 22 nt, Artificial Sequence
  Synthesized RNAi sequence
aguaacugguuuuaugguuguu

SEQ ID NO: 6836 - RNA, 22 nt, Artificial Sequence
  Synthesized RNAi sequence
aguaacuucuaugucagauuga

SEQ ID NO: 6837 - RNA, 22 nt, Artificial Sequence
  Synthesized RNAi sequence
aguaagaaggcaugccuaaauu

SEQ ID NO: 6838 - RNA, 22 nt, Artificial Sequence
  Synthesized RNAi sequence
aguaagacuagaauugucuaca

SEQ ID NO: 6839 - RNA, 22 nt, Artificial Sequence
  Synthesized RNAi sequence
aguaagauaaccauuauacgcu

SEQ ID NO: 6840 - RNA, 22 nt, Artificial Sequence
  Synthesized RNAi sequence
aguacaaacacgguuuaaacac

SEQ ID NO: 6841 - RNA, 22 nt, Artificial Sequence
  Synthesized RNAi sequence
aguacaguaagaaggcaugccu

SEQ ID NO: 6842 - RNA, 22 nt, Artificial Sequence
  Synthesized RNAi sequence
aguacaguagguugcaauagug

SEQ ID NO: 6843 - RNA, 22 nt, Artificial Sequence
  Synthesized RNAi sequence
aguacaucaaacgaauuugaug

SEQ ID NO: 6844 - RNA, 22 nt, Artificial Sequence
  Synthesized RNAi sequence
aguaccauacucauauugaguu

SEQ ID NO: 6845 - RNA, 22 nt, Artificial Sequence
  Synthesized RNAi sequence
aguacucaaaagccucaacacg

SEQ ID NO: 6846 - RNA, 22 nt, Artificial Sequence
  Synthesized RNAi sequence
aguacuuuaucaauccuuucau

SEQ ID NO: 6847 - RNA, 22 nt, Artificial Sequence
  Synthesized RNAi sequence
aguagaacuucgugcugauuaa

SEQ ID NO: 6848 - RNA, 22 nt, Artificial Sequence
  Synthesized RNAi sequence
aguagacauuugugcgaacagu

SEQ ID NO: 6849 - RNA, 22 nt, Artificial Sequence
  Synthesized RNAi sequence
aguagaguucaaauagccuucu

SEQ ID NO: 6850 - RNA, 22 nt, Artificial Sequence
  Synthesized RNAi sequence
aguagauaagacauugucuaag

SEQ ID NO: 6851 - RNA, 22 nt, Artificial Sequence
  Synthesized RNAi sequence
aguagauuaaagaaccuaggca

SEQ ID NO: 6852 - RNA, 22 nt, Artificial Sequence
  Synthesized RNAi sequence
aguagcaaggguuuucaaaccu

SEQ ID NO: 6853 - RNA, 22 nt, Artificial Sequence
  Synthesized RNAi sequence
aguagccuuauuuaaggcuccu

SEQ ID NO: 6854 - RNA, 22 nt, Artificial Sequence
  Synthesized RNAi sequence
aguagcuauguaaucaucagau

SEQ ID NO: 6855 - RNA, 22 nt, Artificial Sequence
  Synthesized RNAi sequence
aguaggauuuauuggucuuuua

SEQ ID NO: 6856 - RNA, 22 nt, Artificial Sequence
  Synthesized RNAi sequence
aguaggcuaagauaagugcaca

SEQ ID NO: 6857 - RNA, 22 nt, Artificial Sequence
  Synthesized RNAi sequence
aguagguugcaauagugacauu

SEQ ID NO: 6858 - RNA, 22 nt, Artificial Sequence
  Synthesized RNAi sequence
aguaguauguagccauacucca

SEQ ID NO: 6859 - RNA, 22 nt, Artificial Sequence
  Synthesized RNAi sequence
aguagucggcauagaugcuuua

SEQ ID NO: 6860 - RNA, 22 nt, Artificial Sequence
  Synthesized RNAi sequence
aguaguugcacaugucaacuua

SEQ ID NO: 6861 - RNA, 22 nt, Artificial Sequence
  Synthesized RNAi sequence
aguaguuguacuaacaacuuug

SEQ ID NO: 6862 - RNA, 22 nt, Artificial Sequence
  Synthesized RNAi sequence
aguauaaugucuccuacaacuu

SEQ ID NO: 6863 - RNA, 22 nt, Artificial Sequence
  Synthesized RNAi sequence
aguauagguugacacauaagcu

SEQ ID NO: 6864 - RNA, 22 nt, Artificial Sequence
  Synthesized RNAi sequence
aguaucccaagggacacuauua

SEQ ID NO: 6865 - RNA, 22 nt, Artificial Sequence
  Synthesized RNAi sequence
aguaucuacacaaacucuuaaa

SEQ ID NO: 6866 - RNA, 22 nt, Artificial Sequence
  Synthesized RNAi sequence
aguauguagccauacuccacuc

SEQ ID NO: 6867 - RNA, 22 nt, Artificial Sequence
  Synthesized RNAi sequence
aguauucuuugcuauaguaguc

SEQ ID NO: 6868 - RNA, 22 nt, Artificial Sequence
  Synthesized RNAi sequence
agucaauacaagcaccaagguc

SEQ ID NO: 6869 - RNA, 22 nt, Artificial Sequence
  Synthesized RNAi sequence
aguccucacuucucucaaagaa

SEQ ID NO: 6870 - RNA, 22 nt, Artificial Sequence
  Synthesized RNAi sequence
agucggcauagaugcuuuaauu

SEQ ID NO: 6871 - RNA, 22 nt, Artificial Sequence
  Synthesized RNAi sequence
agucuuuugaccagcuuuauca

SEQ ID NO: 6872 - RNA, 22 nt, Artificial Sequence
  Synthesized RNAi sequence
agugacaagucucucgcaacuu

SEQ ID NO: 6873 - RNA, 22 nt, Artificial Sequence
  Synthesized RNAi sequence
agugacauuaguagaguucaaa

SEQ ID NO: 6874 - RNA, 22 nt, Artificial Sequence
  Synthesized RNAi sequence
agugaccacacugguaauuacc

SEQ ID NO: 6875 - RNA, 22 nt, Artificial Sequence
  Synthesized RNAi sequence
agugacgcuacaguuguuuuac

SEQ ID NO: 6876 - RNA, 22 nt, Artificial Sequence
  Synthesized RNAi sequence
agugagaugguuucaauaaaau

SEQ ID NO: 6877 - RNA, 22 nt, Artificial Sequence
  Synthesized RNAi sequence
agugauauucacacucuuguaa

SEQ ID NO: 6878 - RNA, 22 nt, Artificial Sequence
  Synthesized RNAi sequence
agugaugucaaugucacuaaca

SEQ ID NO: 6879 - RNA, 22 nt, Artificial Sequence
  Synthesized RNAi sequence
agugcacaaaaguuagcagcuu

SEQ ID NO: 6880 - RNA, 22 nt, Artificial Sequence
  Synthesized RNAi sequence
agugcuaucuuuguuguuacaa

SEQ ID NO: 6881 - RNA, 22 nt, Artificial Sequence
  Synthesized RNAi sequence
aguggcaagauaacaguuguua

SEQ ID NO: 6882 - RNA, 22 nt, Artificial Sequence
  Synthesized RNAi sequence
aguggcaccaaauuccaaaggu

SEQ ID NO: 6883 - RNA, 22 nt, Artificial Sequence
  Synthesized RNAi sequence
aguggcagaaucuggaugaaga

SEQ ID NO: 6884 - RNA, 22 nt, Artificial Sequence
  Synthesized RNAi sequence
aguggcauuguaacaagaguuu

SEQ ID NO: 6885 - RNA, 22 nt, Artificial Sequence
  Synthesized RNAi sequence
agugguccauuaguagcuaugu

SEQ ID NO: 6886 - RNA, 22 nt, Artificial Sequence
  Synthesized RNAi sequence
agugguguaaguaauucagaua

SEQ ID NO: 6887 - RNA, 22 nt, Artificial Sequence
  Synthesized RNAi sequence
agugguuauauaauugucuguu

SEQ ID NO: 6888 - RNA, 22 nt, Artificial Sequence
  Synthesized RNAi sequence
aguguaaccauuuaaacccuga

SEQ ID NO: 6889 - RNA, 22 nt, Artificial Sequence
  Synthesized RNAi sequence
aguguaauauacacuuuuauca

SEQ ID NO: 6890 - RNA, 22 nt, Artificial Sequence
  Synthesized RNAi sequence
aguguacucacuagcacaagua

SEQ ID NO: 6891 - RNA, 22 nt, Artificial Sequence
  Synthesized RNAi sequence
agugucaucauuagguaaaaca

SEQ ID NO: 6892 - RNA, 22 nt, Artificial Sequence
  Synthesized RNAi sequence
agugucuuaagauugucaaagg

SEQ ID NO: 6893 - RNA, 22 nt, Artificial Sequence
  Synthesized RNAi sequence
agugugcccauguacauaacag

SEQ ID NO: 6894 - RNA, 22 nt, Artificial Sequence
  Synthesized RNAi sequence
aguguguugauaagugacgcua

SEQ ID NO: 6895 - RNA, 22 nt, Artificial Sequence
  Synthesized RNAi sequence
aguguuaacaaugcaguggcaa

SEQ ID NO: 6896 - RNA, 22 nt, Artificial Sequence
  Synthesized RNAi sequence
aguguuauuagcucucagguug

SEQ ID NO: 6897 - RNA, 22 nt, Artificial Sequence
  Synthesized RNAi sequence
aguguuuagcaagauugugucc

SEQ ID NO: 6898 - RNA, 22 nt, Artificial Sequence
  Synthesized RNAi sequence
aguguuuauaaucaauagccac

SEQ ID NO: 6899 - RNA, 22 nt, Artificial Sequence
  Synthesized RNAi sequence
aguuaaaacacccucuugaaca

SEQ ID NO: 6900 - RNA, 22 nt, Artificial Sequence
  Synthesized RNAi sequence
aguuaacaaaaugagagagaga

SEQ ID NO: 6901 - RNA, 22 nt, Artificial Sequence
  Synthesized RNAi sequence
aguuaacugguuuaaaucauca

SEQ ID NO: 6902 - RNA, 22 nt, Artificial Sequence
  Synthesized RNAi sequence
aguuagcagcuucaccagcccu

SEQ ID NO: 6903 - RNA, 22 nt, Artificial Sequence
  Synthesized RNAi sequence
aguuauaaauggcuuaacuucc

SEQ ID NO: 6904 - RNA, 22 nt, Artificial Sequence
  Synthesized RNAi sequence
aguuauauguuuauagugacca

SEQ ID NO: 6905 - RNA, 22 nt, Artificial Sequence
  Synthesized RNAi sequence
aguuauuacaacuaucgccagu

SEQ ID NO: 6906 - RNA, 22 nt, Artificial Sequence
  Synthesized RNAi sequence
aguucaaaagugauauucacac

SEQ ID NO: 6907 - RNA, 22 nt, Artificial Sequence
  Synthesized RNAi sequence
aguucaaauagccuucucugua

SEQ ID NO: 6908 - RNA, 22 nt, Artificial Sequence
  Synthesized RNAi sequence
aguucaacuguauaggcagagc

SEQ ID NO: 6909 - RNA, 22 nt, Artificial Sequence
  Synthesized RNAi sequence
aguucagcuucugcaguugcaa

SEQ ID NO: 6910 - RNA, 22 nt, Artificial Sequence
  Synthesized RNAi sequence
aguucauacugagcagguggug

SEQ ID NO: 6911 - RNA, 22 nt, Artificial Sequence
  Synthesized RNAi sequence
aguuccaagaauuucuugcuuc

SEQ ID NO: 6912 - RNA, 22 nt, Artificial Sequence
  Synthesized RNAi sequence
aguuccaucucuaauugagguu

SEQ ID NO: 6913 - RNA, 22 nt, Artificial Sequence
  Synthesized RNAi sequence
aguugaaacuauggcuuuaguu

SEQ ID NO: 6914 - RNA, 22 nt, Artificial Sequence
  Synthesized RNAi sequence
aguugaaugucuucaccuuugu

SEQ ID NO: 6915 - RNA, 22 nt, Artificial Sequence
  Synthesized RNAi sequence
aguugaugaaaacguauuaacg

SEQ ID NO: 6916 - RNA, 22 nt, Artificial Sequence
  Synthesized RNAi sequence
aguugaugaauuacaaccgucu

SEQ ID NO: 6917 - RNA, 22 nt, Artificial Sequence
  Synthesized RNAi sequence
aguugauggcucaaacucuucu

SEQ ID NO: 6918 - RNA, 22 nt, Artificial Sequence
  Synthesized RNAi sequence
aguugcacaugucaacuuaaaa

SEQ ID NO: 6919 - RNA, 22 nt, Artificial Sequence
  Synthesized RNAi sequence
aguugcauuguuaacaugccaa

SEQ ID NO: 6920 - RNA, 22 nt, Artificial Sequence
  Synthesized RNAi sequence
aguuggaccaaacuguugucca

SEQ ID NO: 6921 - RNA, 22 nt, Artificial Sequence
  Synthesized RNAi sequence
aguuguacauucgacucuuguu

SEQ ID NO: 6922 - RNA, 22 nt, Artificial Sequence
  Synthesized RNAi sequence
aguuguacuaacaacuuuguua

SEQ ID NO: 6923 - RNA, 22 nt, Artificial Sequence
  Synthesized RNAi sequence
aguugucugauuguccucacug

SEQ ID NO: 6924 - RNA, 22 nt, Artificial Sequence
  Synthesized RNAi sequence
aguuguguagauuguccagaau

SEQ ID NO: 6925 - RNA, 22 nt, Artificial Sequence
  Synthesized RNAi sequence
aguugugugguaguacucaaaa

SEQ ID NO: 6926 - RNA, 22 nt, Artificial Sequence
  Synthesized RNAi sequence
aguuguuaucugcccauuuaau

SEQ ID NO: 6927 - RNA, 22 nt, Artificial Sequence
  Synthesized RNAi sequence
aguuguucagacaaugacauga

SEQ ID NO: 6928 - RNA, 22 nt, Artificial Sequence
  Synthesized RNAi sequence
aguuguuguaacuucuucaaca

SEQ ID NO: 6929 - RNA, 22 nt, Artificial Sequence
  Synthesized RNAi sequence
aguuguuuuacugguguaaaag

SEQ ID NO: 6930 - RNA, 22 nt, Artificial Sequence
  Synthesized RNAi sequence
aguuucauuuagaucguuaagu

SEQ ID NO: 6931 - RNA, 22 nt, Artificial Sequence
  Synthesized RNAi sequence
aguuuccacacagacaggcauu

SEQ ID NO: 6932 - RNA, 22 nt, Artificial Sequence
  Synthesized RNAi sequence
aguuucuaaagaaggauaggug

SEQ ID NO: 6933 - RNA, 22 nt, Artificial Sequence
  Synthesized RNAi sequence
aguuucuacaucugaaucaaca

SEQ ID NO: 6934 - RNA, 22 nt, Artificial Sequence
  Synthesized RNAi sequence
aguuucuuccagaguuguugua

SEQ ID NO: 6935 - RNA, 22 nt, Artificial Sequence
  Synthesized RNAi sequence
aguuuguugacuaucaucaucu

SEQ ID NO: 6936 - RNA, 22 nt, Artificial Sequence
  Synthesized RNAi sequence
aguuuuaaauaaccacuaaaac

SEQ ID NO: 6937 - RNA, 22 nt, Artificial Sequence
  Synthesized RNAi sequence
aguuuuacacaccacguucaag

SEQ ID NO: 6938 - RNA, 22 nt, Artificial Sequence
  Synthesized RNAi sequence
aguuuucacauuacacucaaga

SEQ ID NO: 6939 - RNA, 22 nt, Artificial Sequence
  Synthesized RNAi sequence
aguuuucugugaggaacuuagu

SEQ ID NO: 6940 - RNA, 22 nt, Artificial Sequence
  Synthesized RNAi sequence
auaaaaggaccuucuaacacca

SEQ ID NO: 6941 - RNA, 22 nt, Artificial Sequence
  Synthesized RNAi sequence
auaaaaguagauaagacauugu

SEQ ID NO: 6942 - RNA, 22 nt, Artificial Sequence
  Synthesized RNAi sequence
auaaaauguucuucagguguuu

SEQ ID NO: 6943 - RNA, 22 nt, Artificial Sequence
  Synthesized RNAi sequence
auaaaauguuuuaccuucaugu

SEQ ID NO: 6944 - RNA, 22 nt, Artificial Sequence
  Synthesized RNAi sequence
auaaaguaacaaguuuucugug

SEQ ID NO: 6945 - RNA, 22 nt, Artificial Sequence
  Synthesized RNAi sequence
auaaauggcuuaacuuccucuu

SEQ ID NO: 6946 - RNA, 22 nt, Artificial Sequence
  Synthesized RNAi sequence
auaaauguacuaccagcacaga

SEQ ID NO: 6947 - RNA, 22 nt, Artificial Sequence
  Synthesized RNAi sequence
auaacaaaaggugacuccuguu

SEQ ID NO: 6948 - RNA, 22 nt, Artificial Sequence
  Synthesized RNAi sequence
auaacagcuucuacacccuuaa

SEQ ID NO: 6949 - RNA, 22 nt, Artificial Sequence
  Synthesized RNAi sequence
auaacaguuguuaucugcccau

SEQ ID NO: 6950 - RNA, 22 nt, Artificial Sequence
  Synthesized RNAi sequence
auaaccacuaaaacuauucacu

SEQ ID NO: 6951 - RNA, 22 nt, Artificial Sequence
  Synthesized RNAi sequence
auaaccaguuaacugguuuaaa

SEQ ID NO: 6952 - RNA, 22 nt, Artificial Sequence
  Synthesized RNAi sequence
auaaccauuauacgcuguaaca

SEQ ID NO: 6953 - RNA, 22 nt, Artificial Sequence
  Synthesized RNAi sequence
auaacuucaccaucuaggugga

SEQ ID NO: 6954 - RNA, 22 nt, Artificial Sequence
  Synthesized RNAi sequence
auaacuuuuccauacauaauaa

SEQ ID NO: 6955 - RNA, 22 nt, Artificial Sequence
  Synthesized RNAi sequence
auaagaaagugugcccauguac

SEQ ID NO: 6956 - RNA, 22 nt, Artificial Sequence
  Synthesized RNAi sequence
auaagaauugucuuucuuauaa

SEQ ID NO: 6957 - RNA, 22 nt, Artificial Sequence
  Synthesized RNAi sequence
auaagacauugucuaaggacac

SEQ ID NO: 6958 - RNA, 22 nt, Artificial Sequence
  Synthesized RNAi sequence
auaagcacucuuaagaaguuga

SEQ ID NO: 6959 - RNA, 22 nt, Artificial Sequence
  Synthesized RNAi sequence
auaagcagccauuagaucugug

SEQ ID NO: 6960 - RNA, 22 nt, Artificial Sequence
  Synthesized RNAi sequence
auaagcaucuuguagagcaggu

SEQ ID NO: 6961 - RNA, 22 nt, Artificial Sequence
  Synthesized RNAi sequence
auaagcugacuguaguaaacag

SEQ ID NO: 6962 - RNA, 22 nt, Artificial Sequence
  Synthesized RNAi sequence
auaaggcauauaauuaguacaa

SEQ ID NO: 6963 - RNA, 22 nt, Artificial Sequence
  Synthesized RNAi sequence
auaaguaacugguuuuaugguu

SEQ ID NO: 6964 - RNA, 22 nt, Artificial Sequence
  Synthesized RNAi sequence
auaaguaguauguagccauacu

SEQ ID NO: 6965 - RNA, 22 nt, Artificial Sequence
  Synthesized RNAi sequence
auaagucuuuugaccagcuuua

SEQ ID NO: 6966 - RNA, 22 nt, Artificial Sequence
  Synthesized RNAi sequence
auaagugacgcuacaguuguuu

SEQ ID NO: 6967 - RNA, 22 nt, Artificial Sequence
  Synthesized RNAi sequence
auaagugcacaaaaguuagcag

SEQ ID NO: 6968 - RNA, 22 nt, Artificial Sequence
  Synthesized RNAi sequence
auaaguuggaccaaacuguugu

SEQ ID NO: 6969 - RNA, 22 nt, Artificial Sequence
  Synthesized RNAi sequence
auaauaaaaugaugcaaagaag

SEQ ID NO: 6970 - RNA, 22 nt, Artificial Sequence
  Synthesized RNAi sequence
auaauaauuguccaacuuaggg

SEQ ID NO: 6971 - RNA, 22 nt, Artificial Sequence
  Synthesized RNAi sequence
auaauagaugguagaauguaaa

SEQ ID NO: 6972 - RNA, 22 nt, Artificial Sequence
  Synthesized RNAi sequence
auaaucaaccacacccucuugu

SEQ ID NO: 6973 - RNA, 22 nt, Artificial Sequence
  Synthesized RNAi sequence
auaaucaauagccaccacauca

SEQ ID NO: 6974 - RNA, 22 nt, Artificial Sequence
  Synthesized RNAi sequence
auaauggugcaaguagaacuuc

SEQ ID NO: 6975 - RNA, 22 nt, Artificial Sequence
  Synthesized RNAi sequence
auaaugucuccuacaacuucgg

SEQ ID NO: 6976 - RNA, 22 nt, Artificial Sequence
  Synthesized RNAi sequence
auaauuaaaugaagccucuaga

SEQ ID NO: 6977 - RNA, 22 nt, Artificial Sequence
  Synthesized RNAi sequence
auaauuagcuauaguaucccaa

SEQ ID NO: 6978 - RNA, 22 nt, Artificial Sequence
  Synthesized RNAi sequence
auaauuaguacaaacacgguuu

SEQ ID NO: 6979 - RNA, 22 nt, Artificial Sequence
  Synthesized RNAi sequence
auaauucauuagguuucuuaau

SEQ ID NO: 6980 - RNA, 22 nt, Artificial Sequence
  Synthesized RNAi sequence
auaauuguccaacuuaggguca

SEQ ID NO: 6981 - RNA, 22 nt, Artificial Sequence
  Synthesized RNAi sequence
auacaaacuuaaaauuaucgaa

SEQ ID NO: 6982 - RNA, 22 nt, Artificial Sequence
  Synthesized RNAi sequence
auacaaaguuucuuuagaaguu

SEQ ID NO: 6983 - RNA, 22 nt, Artificial Sequence
  Synthesized RNAi sequence
auacaagcaccaaggucacggg

SEQ ID NO: 6984 - RNA, 22 nt, Artificial Sequence
  Synthesized RNAi sequence
auacaaguugaugaauuacaac

SEQ ID NO: 6985 - RNA, 22 nt, Artificial Sequence
  Synthesized RNAi sequence
auacaccagguauuugguuuau

SEQ ID NO: 6986 - RNA, 22 nt, Artificial Sequence
  Synthesized RNAi sequence
auacacuuuuaucaccucucuu

SEQ ID NO: 6987 - RNA, 22 nt, Artificial Sequence
  Synthesized RNAi sequence
auacauaauaaaaugaugcaaa

SEQ ID NO: 6988 - RNA, 22 nt, Artificial Sequence
  Synthesized RNAi sequence
auacccuuauauuuacgcugua

SEQ ID NO: 6989 - RNA, 22 nt, Artificial Sequence
  Synthesized RNAi sequence
auaccgagcagcuucuuccaaa

SEQ ID NO: 6990 - RNA, 22 nt, Artificial Sequence
  Synthesized RNAi sequence
auaccuaguuguguagauuguc

SEQ ID NO: 6991 - RNA, 22 nt, Artificial Sequence
  Synthesized RNAi sequence
auacgcuguaacagcaucaggu

SEQ ID NO: 6992 - RNA, 22 nt, Artificial Sequence
  Synthesized RNAi sequence
auacguggcuuuauuaguugca

SEQ ID NO: 6993 - RNA, 22 nt, Artificial Sequence
  Synthesized RNAi sequence
auacucauauugaguugauggc

SEQ ID NO: 6994 - RNA, 22 nt, Artificial Sequence
  Synthesized RNAi sequence
auacuccacucaucuaaaucaa

SEQ ID NO: 6995 - RNA, 22 nt, Artificial Sequence
  Synthesized RNAi sequence
auacucuagauaauucauuagg

SEQ ID NO: 6996 - RNA, 22 nt, Artificial Sequence
  Synthesized RNAi sequence
auacugagcagguggugcugac

SEQ ID NO: 6997 - RNA, 22 nt, Artificial Sequence
  Synthesized RNAi sequence
auagaaccaguacaguagguug

SEQ ID NO: 6998 - RNA, 22 nt, Artificial Sequence
  Synthesized RNAi sequence
auagaaguuaaaccauuaacuu

SEQ ID NO: 6999 - RNA, 22 nt, Artificial Sequence
  Synthesized RNAi sequence
auagacauaaaaggaccuucua

SEQ ID NO: 7000 - RNA, 22 nt, Artificial Sequence
  Synthesized RNAi sequence
auagaugguagaauguaaaagg

SEQ ID NO: 7001 - RNA, 22 nt, Artificial Sequence
  Synthesized RNAi sequence
auagccaaguggcauuguaaca

SEQ ID NO: 7002 - RNA, 22 nt, Artificial Sequence
  Synthesized RNAi sequence
auagccuucucuguaaccagua

SEQ ID NO: 7003 - RNA, 22 nt, Artificial Sequence
  Synthesized RNAi sequence
auagcugaaaucggggccauuu

SEQ ID NO: 7004 - RNA, 22 nt, Artificial Sequence
  Synthesized RNAi sequence
auaggaaccagcaagugagaug

SEQ ID NO: 7005 - RNA, 22 nt, Artificial Sequence
  Synthesized RNAi sequence
auaggaccaaucuuuauaggaa

SEQ ID NO: 7006 - RNA, 22 nt, Artificial Sequence
  Synthesized RNAi sequence
auaggaccuuuguauucugagg

SEQ ID NO: 7007 - RNA, 22 nt, Artificial Sequence
  Synthesized RNAi sequence
auaggcaaugaaccuuuagugu

SEQ ID NO: 7008 - RNA, 22 nt, Artificial Sequence
  Synthesized RNAi sequence
auaggcagagcacuucucauua

SEQ ID NO: 7009 - RNA, 22 nt, Artificial Sequence
  Synthesized RNAi sequence
auaggugagcauauaguuauua

SEQ ID NO: 7010 - RNA, 22 nt, Artificial Sequence
  Synthesized RNAi sequence
auaggugucuaaagaaucuaaa

SEQ ID NO: 7011 - RNA, 22 nt, Artificial Sequence
  Synthesized RNAi sequence
auagguugacacauaagcugac

SEQ ID NO: 7012 - RNA, 22 nt, Artificial Sequence
  Synthesized RNAi sequence
auaguaagacuagaauugucua

SEQ ID NO: 7013 - RNA, 22 nt, Artificial Sequence
  Synthesized RNAi sequence
auaguagucggcauagaugcuu

SEQ ID NO: 7014 - RNA, 22 nt, Artificial Sequence
  Synthesized RNAi sequence
auaguaucccaagggacacuau

SEQ ID NO: 7015 - RNA, 22 nt, Artificial Sequence
  Synthesized RNAi sequence
auaguccucacuucucucaaag

SEQ ID NO: 7016 - RNA, 22 nt, Artificial Sequence
  Synthesized RNAi sequence
auagucugaacaacugguguaa

SEQ ID NO: 7017 - RNA, 22 nt, Artificial Sequence
  Synthesized RNAi sequence
auagugacauuaguagaguuca

SEQ ID NO: 7018 - RNA, 22 nt, Artificial Sequence
  Synthesized RNAi sequence
auagugaccacacugguaauua

SEQ ID NO: 7019 - RNA, 22 nt, Artificial Sequence
  Synthesized RNAi sequence
auaguuauuacaacuaucgcca

SEQ ID NO: 7020 - RNA, 22 nt, Artificial Sequence
  Synthesized RNAi sequence
auaguugaaacuauggcuuuag

SEQ ID NO: 7021 - RNA, 22 nt, Artificial Sequence
  Synthesized RNAi sequence
auaguuguacauucgacucuug

SEQ ID NO: 7022 - RNA, 22 nt, Artificial Sequence
  Synthesized RNAi sequence
auaguuucuaaagaaggauagg

SEQ ID NO: 7023 - RNA, 22 nt, Artificial Sequence
  Synthesized RNAi sequence
auauaauuaguacaaacacggu

SEQ ID NO: 7024 - RNA, 22 nt, Artificial Sequence
  Synthesized RNAi sequence
auauaauugucuguuggcacuu

SEQ ID NO: 7025 - RNA, 22 nt, Artificial Sequence
  Synthesized RNAi sequence
auauaccgagcagcuucuucca

SEQ ID NO: 7026 - RNA, 22 nt, Artificial Sequence
  Synthesized RNAi sequence
auauaguuauuacaacuaucgc

SEQ ID NO: 7027 - RNA, 22 nt, Artificial Sequence
  Synthesized RNAi sequence
auauauggagcaucuuucuuua

SEQ ID NO: 7028 - RNA, 22 nt, Artificial Sequence
  Synthesized RNAi sequence
auaugacgcgcacuacagucaa

SEQ ID NO: 7029 - RNA, 22 nt, Artificial Sequence
  Synthesized RNAi sequence
auauggagcaucuuucuuuaag

SEQ ID NO: 7030 - RNA, 22 nt, Artificial Sequence
  Synthesized RNAi sequence
auaugucauugacauguccaca

SEQ ID NO: 7031 - RNA, 22 nt, Artificial Sequence
  Synthesized RNAi sequence
auaugugaagccaauuuaaacu

SEQ ID NO: 7032 - RNA, 22 nt, Artificial Sequence
  Synthesized RNAi sequence
auauguuuauagugaccacacu

SEQ ID NO: 7033 - RNA, 22 nt, Artificial Sequence
  Synthesized RNAi sequence
auauuaucacauacaaacuuaa

SEQ ID NO: 7034 - RNA, 22 nt, Artificial Sequence
  Synthesized RNAi sequence
auauucacacucuuguaaccuu

SEQ ID NO: 7035 - RNA, 22 nt, Artificial Sequence
  Synthesized RNAi sequence
auauugaguugauggcucaaac

SEQ ID NO: 7036 - RNA, 22 nt, Artificial Sequence
  Synthesized RNAi sequence
auauuuacgcuguauaguugaa

SEQ ID NO: 7037 - RNA, 22 nt, Artificial Sequence
  Synthesized RNAi sequence
auauuuuguagcuuguuuacca

SEQ ID NO: 7038 - RNA, 22 nt, Artificial Sequence
  Synthesized RNAi sequence
aucaaacauuuuaacugcaacu

SEQ ID NO: 7039 - RNA, 22 nt, Artificial Sequence
  Synthesized RNAi sequence
aucaaacgaauuugauguuuca

SEQ ID NO: 7040 - RNA, 22 nt, Artificial Sequence
  Synthesized RNAi sequence
aucaaauaaguaguauguagcc

SEQ ID NO: 7041 - RNA, 22 nt, Artificial Sequence
  Synthesized RNAi sequence
aucaacaaacccuugccgagcu

SEQ ID NO: 7042 - RNA, 22 nt, Artificial Sequence
  Synthesized RNAi sequence
aucaaccacacccucuuguauu

SEQ ID NO: 7043 - RNA, 22 nt, Artificial Sequence
  Synthesized RNAi sequence
aucaacgauguaagaagacugg

SEQ ID NO: 7044 - RNA, 22 nt, Artificial Sequence
  Synthesized RNAi sequence
aucaaguucaaaagugauauuc

SEQ ID NO: 7045 - RNA, 22 nt, Artificial Sequence
  Synthesized RNAi sequence
aucaauagccaccacaucacca

SEQ ID NO: 7046 - RNA, 22 nt, Artificial Sequence
  Synthesized RNAi sequence
aucaauccuuucaucaaguuca

SEQ ID NO: 7047 - RNA, 22 nt, Artificial Sequence
  Synthesized RNAi sequence
aucaaugcccagugguguaagu

SEQ ID NO: 7048 - RNA, 22 nt, Artificial Sequence
  Synthesized RNAi sequence
aucacagugucaucaccaaaag

SEQ ID NO: 7049 - RNA, 22 nt, Artificial Sequence
  Synthesized RNAi sequence
aucacauacaaacuuaaaauua

SEQ ID NO: 7050 - RNA, 22 nt, Artificial Sequence
  Synthesized RNAi sequence
aucaccaacaucagacacuaau

SEQ ID NO: 7051 - RNA, 22 nt, Artificial Sequence
  Synthesized RNAi sequence
aucacccacuauauauggagca

SEQ ID NO: 7052 - RNA, 22 nt, Artificial Sequence
  Synthesized RNAi sequence
aucaccuaacucaccuacuguc

SEQ ID NO: 7053 - RNA, 22 nt, Artificial Sequence
  Synthesized RNAi sequence
aucaccucucuuaagaaauucu

SEQ ID NO: 7054 - RNA, 22 nt, Artificial Sequence
  Synthesized RNAi sequence
aucacuaauaaauguacuacca

SEQ ID NO: 7055 - RNA, 22 nt, Artificial Sequence
  Synthesized RNAi sequence
aucagacacuaaugccugaucu

SEQ ID NO: 7056 - RNA, 22 nt, Artificial Sequence
  Synthesized RNAi sequence
aucagauucaacuugcauggca

SEQ ID NO: 7057 - RNA, 22 nt, Artificial Sequence
  Synthesized RNAi sequence
aucagcaaauuugauauuauca

SEQ ID NO: 7058 - RNA, 22 nt, Artificial Sequence
  Synthesized RNAi sequence
aucagcuccauccaaauaaguu

SEQ ID NO: 7059 - RNA, 22 nt, Artificial Sequence
  Synthesized RNAi sequence
aucaggugaagaaacagaaacu

SEQ ID NO: 7060 - RNA, 22 nt, Artificial Sequence
  Synthesized RNAi sequence
aucaguugugugguaguacuca

SEQ ID NO: 7061 - RNA, 22 nt, Artificial Sequence
  Synthesized RNAi sequence
aucauaacaaaaggugacuccu

SEQ ID NO: 7062 - RNA, 22 nt, Artificial Sequence
  Synthesized RNAi sequence
aucauacaaguugaugaauuac

SEQ ID NO: 7063 - RNA, 22 nt, Artificial Sequence
  Synthesized RNAi sequence
aucaucagauucaacuugcaug

SEQ ID NO: 7064 - RNA, 22 nt, Artificial Sequence
  Synthesized RNAi sequence
aucaucagcaaauuugauauua

SEQ ID NO: 7065 - RNA, 22 nt, Artificial Sequence
  Synthesized RNAi sequence
aucaucaucuaaccaaucuucu

SEQ ID NO: 7066 - RNA, 22 nt, Artificial Sequence
  Synthesized RNAi sequence
aucaucuaaccaaucuucuucu

SEQ ID NO: 7067 - RNA, 22 nt, Artificial Sequence
  Synthesized RNAi sequence
aucaucuuguuuucucuguuca

SEQ ID NO: 7068 - RNA, 22 nt, Artificial Sequence
  Synthesized RNAi sequence
aucauuagguaaaacauaaaau

SEQ ID NO: 7069 - RNA, 22 nt, Artificial Sequence
  Synthesized RNAi sequence
auccaaauaaguuggaccaaac

SEQ ID NO: 7070 - RNA, 22 nt, Artificial Sequence
  Synthesized RNAi sequence
auccaauuuauaaguaacuggu

SEQ ID NO: 7071 - RNA, 22 nt, Artificial Sequence
  Synthesized RNAi sequence
auccauucccugcgcguccucu

SEQ ID NO: 7072 - RNA, 22 nt, Artificial Sequence
  Synthesized RNAi sequence
aucccaagggacacuauuaaca

SEQ ID NO: 7073 - RNA, 22 nt, Artificial Sequence
  Synthesized RNAi sequence
aucccauuuaaaagaugaaaug

SEQ ID NO: 7074 - RNA, 22 nt, Artificial Sequence
  Synthesized RNAi sequence
auccguaauaggaccuuuguau

SEQ ID NO: 7075 - RNA, 22 nt, Artificial Sequence
  Synthesized RNAi sequence
auccucaucuggaggguagaaa

SEQ ID NO: 7076 - RNA, 22 nt, Artificial Sequence
  Synthesized RNAi sequence
auccuuucaucaaguucaaaag

SEQ ID NO: 7077 - RNA, 22 nt, Artificial Sequence
  Synthesized RNAi sequence
aucgaagcuugcguuuggauau

SEQ ID NO: 7078 - RNA, 22 nt, Artificial Sequence
  Synthesized RNAi sequence
aucgccaguaacuucuauguca

SEQ ID NO: 7079 - RNA, 22 nt, Artificial Sequence
  Synthesized RNAi sequence
aucggggccauuuguacaagau

SEQ ID NO: 7080 - RNA, 22 nt, Artificial Sequence
  Synthesized RNAi sequence
aucguuaaguguguugauaagu

SEQ ID NO: 7081 - RNA, 22 nt, Artificial Sequence
  Synthesized RNAi sequence
aucuaaaccacuaagacaaaca

SEQ ID NO: 7082 - RNA, 22 nt, Artificial Sequence
  Synthesized RNAi sequence
aucuaaaucaaugcccaguggu

SEQ ID NO: 7083 - RNA, 22 nt, Artificial Sequence
  Synthesized RNAi sequence
aucuaaauuggcauguugaaac

SEQ ID NO: 7084 - RNA, 22 nt, Artificial Sequence
  Synthesized RNAi sequence
aucuaaccaaucuucuucuugc

SEQ ID NO: 7085 - RNA, 22 nt, Artificial Sequence
  Synthesized RNAi sequence
aucuacacaaacucuuaaagaa

SEQ ID NO: 7086 - RNA, 22 nt, Artificial Sequence
  Synthesized RNAi sequence
aucuagcaccauaaucaaccac

SEQ ID NO: 7087 - RNA, 22 nt, Artificial Sequence
  Synthesized RNAi sequence
aucuagguggaaugugguagga

SEQ ID NO: 7088 - RNA, 22 nt, Artificial Sequence
  Synthesized RNAi sequence
aucuaguaacaguauagguuga

SEQ ID NO: 7089 - RNA, 22 nt, Artificial Sequence
  Synthesized RNAi sequence
aucucagcgaucuuuuguucaa

SEQ ID NO: 7090 - RNA, 22 nt, Artificial Sequence
  Synthesized RNAi sequence
aucucauauaccgagcagcuuc

SEQ ID NO: 7091 - RNA, 22 nt, Artificial Sequence
  Synthesized RNAi sequence
aucugaacaccuuucuuaaauu

SEQ ID NO: 7092 - RNA, 22 nt, Artificial Sequence
  Synthesized RNAi sequence
aucugaaucaacaaacccuugc

SEQ ID NO: 7093 - RNA, 22 nt, Artificial Sequence
  Synthesized RNAi sequence
aucugcccauuuaauagaaguu

SEQ ID NO: 7094 - RNA, 22 nt, Artificial Sequence
  Synthesized RNAi sequence
aucuggaggguagaaagaacaa

SEQ ID NO: 7095 - RNA, 22 nt, Artificial Sequence
  Synthesized RNAi sequence
aucuggaugaagauugccauua

SEQ ID NO: 7096 - RNA, 22 nt, Artificial Sequence
  Synthesized RNAi sequence
aucuucaguaccauacucauau

SEQ ID NO: 7097 - RNA, 22 nt, Artificial Sequence
  Synthesized RNAi sequence
aucuucgcaggcaagauuaucc

SEQ ID NO: 7098 - RNA, 22 nt, Artificial Sequence
  Synthesized RNAi sequence
aucuuguagagcagguggauua

SEQ ID NO: 7099 - RNA, 22 nt, Artificial Sequence
  Synthesized RNAi sequence
aucuuguuuucucuguucaacu

SEQ ID NO: 7100 - RNA, 22 nt, Artificial Sequence
  Synthesized RNAi sequence
aucuuuaacguuccauaucaaa

SEQ ID NO: 7101 - RNA, 22 nt, Artificial Sequence
  Synthesized RNAi sequence
aucuuuaguuucuacaucugaa

SEQ ID NO: 7102 - RNA, 22 nt, Artificial Sequence
  Synthesized RNAi sequence
aucuuuauaggaaccagcaagu

SEQ ID NO: 7103 - RNA, 22 nt, Artificial Sequence
  Synthesized RNAi sequence
aucuuucuuuaagaaagugaug

SEQ ID NO: 7104 - RNA, 22 nt, Artificial Sequence
  Synthesized RNAi sequence
aucuuuguuguuacaacauuaa

SEQ ID NO: 7105 - RNA, 22 nt, Artificial Sequence
  Synthesized RNAi sequence
augaaaacguauuaacguaagc

SEQ ID NO: 7106 - RNA, 22 nt, Artificial Sequence
  Synthesized RNAi sequence
augaaaucuuuaacguuccaua

SEQ ID NO: 7107 - RNA, 22 nt, Artificial Sequence
  Synthesized RNAi sequence
augaaaugguaauuuguauagu

SEQ ID NO: 7108 - RNA, 22 nt, Artificial Sequence
  Synthesized RNAi sequence
augaaccuuuaguguuauuagc

SEQ ID NO: 7109 - RNA, 22 nt, Artificial Sequence
  Synthesized RNAi sequence
augaagacaguguuuagcaaga

SEQ ID NO: 7110 - RNA, 22 nt, Artificial Sequence
  Synthesized RNAi sequence
augaagauugccauuaauguca

SEQ ID NO: 7111 - RNA, 22 nt, Artificial Sequence
  Synthesized RNAi sequence
augaagccucuagacaaaauuu

SEQ ID NO: 7112 - RNA, 22 nt, Artificial Sequence
  Synthesized RNAi sequence
augaauuacaaccgucuacaac

SEQ ID NO: 7113 - RNA, 22 nt, Artificial Sequence
  Synthesized RNAi sequence
augacaugaaaucuuuaacguu

SEQ ID NO: 7114 - RNA, 22 nt, Artificial Sequence
  Synthesized RNAi sequence
augacgcgcacuacagucaaua

SEQ ID NO: 7115 - RNA, 22 nt, Artificial Sequence
  Synthesized RNAi sequence
augagagagagaaugucuuuca

SEQ ID NO: 7116 - RNA, 22 nt, Artificial Sequence
  Synthesized RNAi sequence
augagguuuuauuuuaguaaca

SEQ ID NO: 7117 - RNA, 22 nt, Artificial Sequence
  Synthesized RNAi sequence
augaguagcaaggguuuucaaa

SEQ ID NO: 7118 - RNA, 22 nt, Artificial Sequence
  Synthesized RNAi sequence
augaugcaaagaagauguacau

SEQ ID NO: 7119 - RNA, 22 nt, Artificial Sequence
  Synthesized RNAi sequence
augcaaagaagauguacauucu

SEQ ID NO: 7120 - RNA, 22 nt, Artificial Sequence
  Synthesized RNAi sequence
augcaauacaaaguuucuuuag

SEQ ID NO: 7121 - RNA, 22 nt, Artificial Sequence
  Synthesized RNAi sequence
augcacauaacuuuuccauaca

SEQ ID NO: 7122 - RNA, 22 nt, Artificial Sequence
  Synthesized RNAi sequence
augcaguggcaagauaacaguu

SEQ ID NO: 7123 - RNA, 22 nt, Artificial Sequence
  Synthesized RNAi sequence
augccaaacaauagguuuaugu

SEQ ID NO: 7124 - RNA, 22 nt, Artificial Sequence
  Synthesized RNAi sequence
augcccagugguguaaguaauu

SEQ ID NO: 7125 - RNA, 22 nt, Artificial Sequence
  Synthesized RNAi sequence
augcugacauguaccuacccag

SEQ ID NO: 7126 - RNA, 22 nt, Artificial Sequence
  Synthesized RNAi sequence
augcuuaaguucauacugagca

SEQ ID NO: 7127 - RNA, 22 nt, Artificial Sequence
  Synthesized RNAi sequence
augcuuuaauucuagaauuugu

SEQ ID NO: 7128 - RNA, 22 nt, Artificial Sequence
  Synthesized RNAi sequence
auggaaccauucuucacuguaa

SEQ ID NO: 7129 - RNA, 22 nt, Artificial Sequence
  Synthesized RNAi sequence
auggagcaucuuucuuuaagaa

SEQ ID NO: 7130 - RNA, 22 nt, Artificial Sequence
  Synthesized RNAi sequence
auggauggaaccauucuucacu

SEQ ID NO: 7131 - RNA, 22 nt, Artificial Sequence
  Synthesized RNAi sequence
auggcauuguuaguagccuuau

SEQ ID NO: 7132 - RNA, 22 nt, Artificial Sequence
  Synthesized RNAi sequence
auggcucaaacucuucuucuuc

SEQ ID NO: 7133 - RNA, 22 nt, Artificial Sequence
  Synthesized RNAi sequence
auggcuuaacuuccucuuuagg

SEQ ID NO: 7134 - RNA, 22 nt, Artificial Sequence
  Synthesized RNAi sequence
augguaauuuguauaguuucua

SEQ ID NO: 7135 - RNA, 22 nt, Artificial Sequence
  Synthesized RNAi sequence
augguaggauuuuccacuacuu

SEQ ID NO: 7136 - RNA, 22 nt, Artificial Sequence
  Synthesized RNAi sequence
auggugcaaguagaacuucgug

SEQ ID NO: 7137 - RNA, 22 nt, Artificial Sequence
  Synthesized RNAi sequence
auguaacaauuuagcuccuuuc

SEQ ID NO: 7138 - RNA, 22 nt, Artificial Sequence
  Synthesized RNAi sequence
auguaagaagacuggucaguag

SEQ ID NO: 7139 - RNA, 22 nt, Artificial Sequence
  Synthesized RNAi sequence
auguaaucaucagauucaacuu

SEQ ID NO: 7140 - RNA, 22 nt, Artificial Sequence
  Synthesized RNAi sequence
auguacauaacagcuucuacac

SEQ ID NO: 7141 - RNA, 22 nt, Artificial Sequence
  Synthesized RNAi sequence
auguacauucuaaccauagcug

SEQ ID NO: 7142 - RNA, 22 nt, Artificial Sequence
  Synthesized RNAi sequence
auguaccaugcuuaaguucaua

SEQ ID NO: 7143 - RNA, 22 nt, Artificial Sequence
  Synthesized RNAi sequence
auguaccuacccagaaaacuag

SEQ ID NO: 7144 - RNA, 22 nt, Artificial Sequence
  Synthesized RNAi sequence
auguacuaccagcacagaaugu

SEQ ID NO: 7145 - RNA, 22 nt, Artificial Sequence
  Synthesized RNAi sequence
auguagccauacuccacucauc

SEQ ID NO: 7146 - RNA, 22 nt, Artificial Sequence
  Synthesized RNAi sequence
augucaauauaaaguaacaagu

SEQ ID NO: 7147 - RNA, 22 nt, Artificial Sequence
  Synthesized RNAi sequence
augucacuaacaagaguggcag

SEQ ID NO: 7148 - RNA, 22 nt, Artificial Sequence
  Synthesized RNAi sequence
augucagauugaugugacaauu

SEQ ID NO: 7149 - RNA, 22 nt, Artificial Sequence
  Synthesized RNAi sequence
augucauugacauguccacaac

SEQ ID NO: 7150 - RNA, 22 nt, Artificial Sequence
  Synthesized RNAi sequence
auguccacaacuugcgugugga

SEQ ID NO: 7151 - RNA, 22 nt, Artificial Sequence
  Synthesized RNAi sequence
augucuccuacaacuucgguag

SEQ ID NO: 7152 - RNA, 22 nt, Artificial Sequence
  Synthesized RNAi sequence
augucuucaccuuuguuaacau

SEQ ID NO: 7153 - RNA, 22 nt, Artificial Sequence
  Synthesized RNAi sequence
augucuuucauaagucuuuuga

SEQ ID NO: 7154 - RNA, 22 nt, Artificial Sequence
  Synthesized RNAi sequence
augugaagccaauuuaaacuca

SEQ ID NO: 7155 - RNA, 22 nt, Artificial Sequence
  Synthesized RNAi sequence
augugaauuaugagguuuuauu

SEQ ID NO: 7156 - RNA, 22 nt, Artificial Sequence
  Synthesized RNAi sequence
augugacaauuuaagacauuca

SEQ ID NO: 7157 - RNA, 22 nt, Artificial Sequence
  Synthesized RNAi sequence
augugcaagcauuucucgcaaa

SEQ ID NO: 7158 - RNA, 22 nt, Artificial Sequence
  Synthesized RNAi sequence
augugguaggauuacuagugua

SEQ ID NO: 7159 - RNA, 22 nt, Artificial Sequence
  Synthesized RNAi sequence
auguguuacauagccaaguggc

SEQ ID NO: 7160 - RNA, 22 nt, Artificial Sequence
  Synthesized RNAi sequence
auguugaaacaaguaacucauu

SEQ ID NO: 7161 - RNA, 22 nt, Artificial Sequence
  Synthesized RNAi sequence
auguugucuacuguuguaaaca

SEQ ID NO: 7162 - RNA, 22 nt, Artificial Sequence
  Synthesized RNAi sequence
auguuuaagguaaacauuggcu

SEQ ID NO: 7163 - RNA, 22 nt, Artificial Sequence
  Synthesized RNAi sequence
auguuuauagugaccacacugg

SEQ ID NO: 7164 - RNA, 22 nt, Artificial Sequence
  Synthesized RNAi sequence
auguuucaacugguuuugugcu

SEQ ID NO: 7165 - RNA, 22 nt, Artificial Sequence
  Synthesized RNAi sequence
auguuuuaccuucaugugaauu

SEQ ID NO: 7166 - RNA, 22 nt, Artificial Sequence
  Synthesized RNAi sequence
auguuuucaacuuuguuauagg

SEQ ID NO: 7167 - RNA, 22 nt, Artificial Sequence
  Synthesized RNAi sequence
auuaaaacaccuaaagcagcgg

SEQ ID NO: 7168 - RNA, 22 nt, Artificial Sequence
  Synthesized RNAi sequence
auuaaaauuuucauaagcacuc

SEQ ID NO: 7169 - RNA, 22 nt, Artificial Sequence
  Synthesized RNAi sequence
auuaaaugaagccucuagacaa

SEQ ID NO: 7170 - RNA, 22 nt, Artificial Sequence
  Synthesized RNAi sequence
auuaacaacuugucuaguaguu

SEQ ID NO: 7171 - RNA, 22 nt, Artificial Sequence
  Synthesized RNAi sequence
auuaacaauaguuguacauucg

SEQ ID NO: 7172 - RNA, 22 nt, Artificial Sequence
  Synthesized RNAi sequence
auuaacagcagcuaaaccauga

SEQ ID NO: 7173 - RNA, 22 nt, Artificial Sequence
  Synthesized RNAi sequence
auuaaccacauaagccaagaau

SEQ ID NO: 7174 - RNA, 22 nt, Artificial Sequence
  Synthesized RNAi sequence
auuaacguaagcaucaaacauu

SEQ ID NO: 7175 - RNA, 22 nt, Artificial Sequence
  Synthesized RNAi sequence
auuaacugcuucaaccaauuau

SEQ ID NO: 7176 - RNA, 22 nt, Artificial Sequence
  Synthesized RNAi sequence
auuaaguacuuuaucaauccuu

SEQ ID NO: 7177 - RNA, 22 nt, Artificial Sequence
  Synthesized RNAi sequence
auuaauaugacgcgcacuacag

SEQ ID NO: 7178 - RNA, 22 nt, Artificial Sequence
  Synthesized RNAi sequence
auuaauuauuaaccacauaagc

SEQ ID NO: 7179 - RNA, 22 nt, Artificial Sequence
  Synthesized RNAi sequence
auuaauuugcguguuucuucug

SEQ ID NO: 7180 - RNA, 22 nt, Artificial Sequence
  Synthesized RNAi sequence
auuacaaccgucuacaacaugc

SEQ ID NO: 7181 - RNA, 22 nt, Artificial Sequence
  Synthesized RNAi sequence
auuacaacuaucgccaguaacu

SEQ ID NO: 7182 - RNA, 22 nt, Artificial Sequence
  Synthesized RNAi sequence
auuacacucaagaacgucuuuc

SEQ ID NO: 7183 - RNA, 22 nt, Artificial Sequence
  Synthesized RNAi sequence
auuacaguaggcuaagauaagu

SEQ ID NO: 7184 - RNA, 22 nt, Artificial Sequence
  Synthesized RNAi sequence
auuaccaguguacucacuagca

SEQ ID NO: 7185 - RNA, 22 nt, Artificial Sequence
  Synthesized RNAi sequence
auuacguuuguaacacaucaua

SEQ ID NO: 7186 - RNA, 22 nt, Artificial Sequence
  Synthesized RNAi sequence
auuacuaguguaauauacacuu

SEQ ID NO: 7187 - RNA, 22 nt, Artificial Sequence
  Synthesized RNAi sequence
auuagacauuaaaacaccuaaa

SEQ ID NO: 7188 - RNA, 22 nt, Artificial Sequence
  Synthesized RNAi sequence
auuagagauaauagaugguaga

SEQ ID NO: 7189 - RNA, 22 nt, Artificial Sequence
  Synthesized RNAi sequence
auuagcuauaguaucccaaggg

SEQ ID NO: 7190 - RNA, 22 nt, Artificial Sequence
  Synthesized RNAi sequence
auuagcucucagguugucuaag

SEQ ID NO: 7191 - RNA, 22 nt, Artificial Sequence
  Synthesized RNAi sequence
auuagguaaaacauaaaauguu

SEQ ID NO: 7192 - RNA, 22 nt, Artificial Sequence
  Synthesized RNAi sequence
auuagguuucuuaauaguaaga

SEQ ID NO: 7193 - RNA, 22 nt, Artificial Sequence
  Synthesized RNAi sequence
auuaguacaaacacgguuuaaa

SEQ ID NO: 7194 - RNA, 22 nt, Artificial Sequence
  Synthesized RNAi sequence
auuaguagaguucaaauagccu

SEQ ID NO: 7195 - RNA, 22 nt, Artificial Sequence
  Synthesized RNAi sequence
auuaguagcuauguaaucauca

SEQ ID NO: 7196 - RNA, 22 nt, Artificial Sequence
  Synthesized RNAi sequence
auuauacgcuguaacagcauca

SEQ ID NO: 7197 - RNA, 22 nt, Artificial Sequence
  Synthesized RNAi sequence
auuaucacauacaaacuuaaaa

SEQ ID NO: 7198 - RNA, 22 nt, Artificial Sequence
  Synthesized RNAi sequence
auuauccauucccugcgcgucc

SEQ ID NO: 7199 - RNA, 22 nt, Artificial Sequence
  Synthesized RNAi sequence
auuaucgaagcuugcguuugga

SEQ ID NO: 7200 - RNA, 22 nt, Artificial Sequence
  Synthesized RNAi sequence
auuaugagguuuuauuuuagua

SEQ ID NO: 7201 - RNA, 22 nt, Artificial Sequence
  Synthesized RNAi sequence
auucaacaacaucuuuaguuuc

SEQ ID NO: 7202 - RNA, 22 nt, Artificial Sequence
  Synthesized RNAi sequence
auucaacuugcauggcauuguu

SEQ ID NO: 7203 - RNA, 22 nt, Artificial Sequence
  Synthesized RNAi sequence
auucacacucuuguaaccuugc

SEQ ID NO: 7204 - RNA, 22 nt, Artificial Sequence
  Synthesized RNAi sequence
auucauuagguuucuuaauagu

SEQ ID NO: 7205 - RNA, 22 nt, Artificial Sequence
  Synthesized RNAi sequence
auuccaaagguuuaccuuggua

SEQ ID NO: 7206 - RNA, 22 nt, Artificial Sequence
  Synthesized RNAi sequence
auuccaagaaacaguuccaaga

SEQ ID NO: 7207 - RNA, 22 nt, Artificial Sequence
  Synthesized RNAi sequence
auucccugcgcguccucugacu

SEQ ID NO: 7208 - RNA, 22 nt, Artificial Sequence
  Synthesized RNAi sequence
auucgacucuuguugcucuauu

SEQ ID NO: 7209 - RNA, 22 nt, Artificial Sequence
  Synthesized RNAi sequence
auucuaaccauagcugaaaucg

SEQ ID NO: 7210 - RNA, 22 nt, Artificial Sequence
  Synthesized RNAi sequence
auucuagaauuuguacuucuag

SEQ ID NO: 7211 - RNA, 22 nt, Artificial Sequence
  Synthesized RNAi sequence
auucuauaccuaguuguguaga

SEQ ID NO: 7212 - RNA, 22 nt, Artificial Sequence
  Synthesized RNAi sequence
auucuucacuguaacacuauca

SEQ ID NO: 7213 - RNA, 22 nt, Artificial Sequence
  Synthesized RNAi sequence
auucuuugcaaguucagcuucu

SEQ ID NO: 7214 - RNA, 22 nt, Artificial Sequence
  Synthesized RNAi sequence
auucuuugcuauaguagucggc

SEQ ID NO: 7215 - RNA, 22 nt, Artificial Sequence
  Synthesized RNAi sequence
auugacauguccacaacuugcg

SEQ ID NO: 7216 - RNA, 22 nt, Artificial Sequence
  Synthesized RNAi sequence
auugaguugauggcucaaacuc

SEQ ID NO: 7217 - RNA, 22 nt, Artificial Sequence
  Synthesized RNAi sequence
auugaugugacaauuuaagaca

SEQ ID NO: 7218 - RNA, 22 nt, Artificial Sequence
  Synthesized RNAi sequence
auugccauuaaugucaauauaa

SEQ ID NO: 7219 - RNA, 22 nt, Artificial Sequence
  Synthesized RNAi sequence
auuggcauguugaaacaaguaa

SEQ ID NO: 7220 - RNA, 22 nt, Artificial Sequence
  Synthesized RNAi sequence
auuggcugcauuaacaaccacu

SEQ ID NO: 7221 - RNA, 22 nt, Artificial Sequence
  Synthesized RNAi sequence
auuggucuuuuaaacuguagug

SEQ ID NO: 7222 - RNA, 22 nt, Artificial Sequence
  Synthesized RNAi sequence
auuguaacaagaguuucauuua

SEQ ID NO: 7223 - RNA, 22 nt, Artificial Sequence
  Synthesized RNAi sequence
auugucaaaggugauaacuuca

SEQ ID NO: 7224 - RNA, 22 nt, Artificial Sequence
  Synthesized RNAi sequence
auuguccaacuuagggucaauu

SEQ ID NO: 7225 - RNA, 22 nt, Artificial Sequence
  Synthesized RNAi sequence
auuguccagaauaggaccaauc

SEQ ID NO: 7226 - RNA, 22 nt, Artificial Sequence
  Synthesized RNAi sequence
auuguccucacugccgucuugu

SEQ ID NO: 7227 - RNA, 22 nt, Artificial Sequence
  Synthesized RNAi sequence
auugucuaaggacacauucuuu

SEQ ID NO: 7228 - RNA, 22 nt, Artificial Sequence
  Synthesized RNAi sequence
auugucuacauaagcagccauu

SEQ ID NO: 7229 - RNA, 22 nt, Artificial Sequence
  Synthesized RNAi sequence
auugucuguuggcacuuuucuc

SEQ ID NO: 7230 - RNA, 22 nt, Artificial Sequence
  Synthesized RNAi sequence
auugucuuucuuauaauaauug

SEQ ID NO: 7231 - RNA, 22 nt, Artificial Sequence
  Synthesized RNAi sequence
auuguguccgcuuaaaacacaa

SEQ ID NO: 7232 - RNA, 22 nt, Artificial Sequence
  Synthesized RNAi sequence
auuguuaacaugccaaacaaua

SEQ ID NO: 7233 - RNA, 22 nt, Artificial Sequence
  Synthesized RNAi sequence
auuguuaguagccuuauuuaag

SEQ ID NO: 7234 - RNA, 22 nt, Artificial Sequence
  Synthesized RNAi sequence
auuguucauaagaaagugugcc

SEQ ID NO: 7235 - RNA, 22 nt, Artificial Sequence
  Synthesized RNAi sequence
auuguuucucuaacaucaccua

SEQ ID NO: 7236 - RNA, 22 nt, Artificial Sequence
  Synthesized RNAi sequence
auuuaaaagaugaaaugguaau

SEQ ID NO: 7237 - RNA, 22 nt, Artificial Sequence
  Synthesized RNAi sequence
auuuaaacccugacccggguaa

SEQ ID NO: 7238 - RNA, 22 nt, Artificial Sequence
  Synthesized RNAi sequence
auuuaaacucaccagacucauc

SEQ ID NO: 7239 - RNA, 22 nt, Artificial Sequence
  Synthesized RNAi sequence
auuuaagccauguguuacauag

SEQ ID NO: 7240 - RNA, 22 nt, Artificial Sequence
  Synthesized RNAi sequence
auuuaaggcuccugcaacaccu

SEQ ID NO: 7241 - RNA, 22 nt, Artificial Sequence
  Synthesized RNAi sequence
auuuaauagaaguuaaaccauu

SEQ ID NO: 7242 - RNA, 22 nt, Artificial Sequence
  Synthesized RNAi sequence
auuuaccgacacucuuaacagu

SEQ ID NO: 7243 - RNA, 22 nt, Artificial Sequence
  Synthesized RNAi sequence
auuuacgcuguauaguugaaac

SEQ ID NO: 7244 - RNA, 22 nt, Artificial Sequence
  Synthesized RNAi sequence
auuuacuucuguaccgaguuca

SEQ ID NO: 7245 - RNA, 22 nt, Artificial Sequence
  Synthesized RNAi sequence
auuuagaucguuaaguguguug

SEQ ID NO: 7246 - RNA, 22 nt, Artificial Sequence
  Synthesized RNAi sequence
auuuagcuccuuucuuaaaaga

SEQ ID NO: 7247 - RNA, 22 nt, Artificial Sequence
  Synthesized RNAi sequence
auuuauaaguaacugguuuuau

SEQ ID NO: 7248 - RNA, 22 nt, Artificial Sequence
  Synthesized RNAi sequence
auuuauuggucuuuuaaacugu

SEQ ID NO: 7249 - RNA, 22 nt, Artificial Sequence
  Synthesized RNAi sequence
auuucucgcaaauuccaagaaa

SEQ ID NO: 7250 - RNA, 22 nt, Artificial Sequence
  Synthesized RNAi sequence
auuucuguacaaacaacaccau

SEQ ID NO: 7251 - RNA, 22 nt, Artificial Sequence
  Synthesized RNAi sequence
auuucuugcuucucauuagaga

SEQ ID NO: 7252 - RNA, 22 nt, Artificial Sequence
  Synthesized RNAi sequence
auuugauauuaucacauacaaa

SEQ ID NO: 7253 - RNA, 22 nt, Artificial Sequence
  Synthesized RNAi sequence
auuugcguguuucuucugcaug

SEQ ID NO: 7254 - RNA, 22 nt, Artificial Sequence
  Synthesized RNAi sequence
auuugggccgacaacaugaaga

SEQ ID NO: 7255 - RNA, 22 nt, Artificial Sequence
  Synthesized RNAi sequence
auuugguuuauacguggcuuua

SEQ ID NO: 7256 - RNA, 22 nt, Artificial Sequence
  Synthesized RNAi sequence
auuuguauaguuucuaaagaag

SEQ ID NO: 7257 - RNA, 22 nt, Artificial Sequence
  Synthesized RNAi sequence
auuugugcgaacaguaucuaca

SEQ ID NO: 7258 - RNA, 22 nt, Artificial Sequence
  Synthesized RNAi sequence
auuuguuggaguguuaacaaug

SEQ ID NO: 7259 - RNA, 22 nt, Artificial Sequence
  Synthesized RNAi sequence
auuuguuuucguaguuguucag

SEQ ID NO: 7260 - RNA, 22 nt, Artificial Sequence
  Synthesized RNAi sequence
auuuuaacugcaacuuccgcac

SEQ ID NO: 7261 - RNA, 22 nt, Artificial Sequence
  Synthesized RNAi sequence
auuuuaauacccuuauauuuac

SEQ ID NO: 7262 - RNA, 22 nt, Artificial Sequence
  Synthesized RNAi sequence
auuuuaccacccuuaagugcua

SEQ ID NO: 7263 - RNA, 22 nt, Artificial Sequence
  Synthesized RNAi sequence
auuuuaguaacaucagcuccau

SEQ ID NO: 7264 - RNA, 22 nt, Artificial Sequence
  Synthesized RNAi sequence
auuuucauaagcacucuuaaga

SEQ ID NO: 7265 - RNA, 22 nt, Artificial Sequence
  Synthesized RNAi sequence
auuuuccacuacuucuucagag

SEQ ID NO: 7266 - RNA, 22 nt, Artificial Sequence
  Synthesized RNAi sequence
auuuugcagaugauucuucaca

SEQ ID NO: 7267 - RNA, 22 nt, Artificial Sequence
  Synthesized RNAi sequence
auuuuguagcuuguuuaccaca

SEQ ID NO: 7268 - RNA, 22 nt, Artificial Sequence
  Synthesized RNAi sequence
uaaaacacaacuaccacccacu

SEQ ID NO: 7269 - RNA, 22 nt, Artificial Sequence
  Synthesized RNAi sequence
uaaaacacccucuugaacaaca

SEQ ID NO: 7270 - RNA, 22 nt, Artificial Sequence
  Synthesized RNAi sequence
uaaaacaccuaaagcagcgguu

SEQ ID NO: 7271 - RNA, 22 nt, Artificial Sequence
  Synthesized RNAi sequence
uaaaacuauucacuucaauagu

SEQ ID NO: 7272 - RNA, 22 nt, Artificial Sequence
  Synthesized RNAi sequence
uaaaagaggguguguaguguuu

SEQ ID NO: 7273 - RNA, 22 nt, Artificial Sequence
  Synthesized RNAi sequence
uaaaagaugaaaugguaauuug

SEQ ID NO: 7274 - RNA, 22 nt, Artificial Sequence
  Synthesized RNAi sequence
uaaaaggaccuucuaacaccau

SEQ ID NO: 7275 - RNA, 22 nt, Artificial Sequence
  Synthesized RNAi sequence
uaaaaguaaaaucuagcaccau

SEQ ID NO: 7276 - RNA, 22 nt, Artificial Sequence
  Synthesized RNAi sequence
uaaaaguagauaagacauuguc

SEQ ID NO: 7277 - RNA, 22 nt, Artificial Sequence
  Synthesized RNAi sequence
uaaaaguugaugaaaacguauu

SEQ ID NO: 7278 - RNA, 22 nt, Artificial Sequence
  Synthesized RNAi sequence
uaaaaucuagcaccauaaucaa

SEQ ID NO: 7279 - RNA, 22 nt, Artificial Sequence
  Synthesized RNAi sequence
uaaaaugaugcaaagaagaugu

SEQ ID NO: 7280 - RNA, 22 nt, Artificial Sequence
  Synthesized RNAi sequence
uaaaauguuuuaccuucaugug

SEQ ID NO: 7281 - RNA, 22 nt, Artificial Sequence
  Synthesized RNAi sequence
uaaaauuaucgaagcuugcguu

SEQ ID NO: 7282 - RNA, 22 nt, Artificial Sequence
  Synthesized RNAi sequence
uaaaauuuucauaagcacucuu

SEQ ID NO: 7283 - RNA, 22 nt, Artificial Sequence
  Synthesized RNAi sequence
uaaacaccguguaacuauguua

SEQ ID NO: 7284 - RNA, 22 nt, Artificial Sequence
  Synthesized RNAi sequence
uaaacaccuuaauaguccucac

SEQ ID NO: 7285 - RNA, 22 nt, Artificial Sequence
  Synthesized RNAi sequence
uaaacagacgcugauuuugcag

SEQ ID NO: 7286 - RNA, 22 nt, Artificial Sequence
  Synthesized RNAi sequence
uaaacauuggcugcauuaacaa

SEQ ID NO: 7287 - RNA, 22 nt, Artificial Sequence
  Synthesized RNAi sequence
uaaaccacuaagacaaacacua

SEQ ID NO: 7288 - RNA, 22 nt, Artificial Sequence
  Synthesized RNAi sequence
uaaaccaugaguagcaaggguu

SEQ ID NO: 7289 - RNA, 22 nt, Artificial Sequence
  Synthesized RNAi sequence
uaaacccugacccggguaagug

SEQ ID NO: 7290 - RNA, 22 nt, Artificial Sequence
  Synthesized RNAi sequence
uaaacucaccagacucaucaaa

SEQ ID NO: 7291 - RNA, 22 nt, Artificial Sequence
  Synthesized RNAi sequence
uaaacuguagugacaagucucu

SEQ ID NO: 7292 - RNA, 22 nt, Artificial Sequence
  Synthesized RNAi sequence
uaaacuucaacucuauuuguug

SEQ ID NO: 7293 - RNA, 22 nt, Artificial Sequence
  Synthesized RNAi sequence
uaaagaaauaaggcauauaauu

SEQ ID NO: 7294 - RNA, 22 nt, Artificial Sequence
  Synthesized RNAi sequence
uaaagaaggauaggugucuaaa

SEQ ID NO: 7295 - RNA, 22 nt, Artificial Sequence
  Synthesized RNAi sequence
uaaagaaucuaaaccacuaaga

SEQ ID NO: 7296 - RNA, 22 nt, Artificial Sequence
  Synthesized RNAi sequence
uaaagauggauggaaccauucu

SEQ ID NO: 7297 - RNA, 22 nt, Artificial Sequence
  Synthesized RNAi sequence
uaaagcaccgucuaugcaauac

SEQ ID NO: 7298 - RNA, 22 nt, Artificial Sequence
  Synthesized RNAi sequence
uaaagcagcgguugaguagauu

SEQ ID NO: 7299 - RNA, 22 nt, Artificial Sequence
  Synthesized RNAi sequence
uaaaguaacaaguuuucuguga

SEQ ID NO: 7300 - RNA, 22 nt, Artificial Sequence
  Synthesized RNAi sequence
uaaaucaaugcccaguggugua

SEQ ID NO: 7301 - RNA, 22 nt, Artificial Sequence
  Synthesized RNAi sequence
uaaaugaagccucuagacaaaa

SEQ ID NO: 7302 - RNA, 22 nt, Artificial Sequence
  Synthesized RNAi sequence
uaaauggcuuaacuuccucuuu

SEQ ID NO: 7303 - RNA, 22 nt, Artificial Sequence
  Synthesized RNAi sequence
uaaauguaccaugcuuaaguuc

SEQ ID NO: 7304 - RNA, 22 nt, Artificial Sequence
  Synthesized RNAi sequence
uaaauguacuaccagcacagaa

SEQ ID NO: 7305 - RNA, 22 nt, Artificial Sequence
  Synthesized RNAi sequence
uaaauuagacauuaaaacaccu

SEQ ID NO: 7306 - RNA, 22 nt, Artificial Sequence
  Synthesized RNAi sequence
uaaauuggcauguugaaacaag

SEQ ID NO: 7307 - RNA, 22 nt, Artificial Sequence
  Synthesized RNAi sequence
uaaauuguucauaagaaagugu

SEQ ID NO: 7308 - RNA, 22 nt, Artificial Sequence
  Synthesized RNAi sequence
uaacaacuugucuaguaguugc

SEQ ID NO: 7309 - RNA, 22 nt, Artificial Sequence
  Synthesized RNAi sequence
uaacaacuuuguuaagaaaagg

SEQ ID NO: 7310 - RNA, 22 nt, Artificial Sequence
  Synthesized RNAi sequence
uaacaagaguggcagaaucugg

SEQ ID NO: 7311 - RNA, 22 nt, Artificial Sequence
  Synthesized RNAi sequence
uaacaagaguuucauuuagauc

SEQ ID NO: 7312 - RNA, 22 nt, Artificial Sequence
  Synthesized RNAi sequence
uaacaaguuuucugugaggaac

SEQ ID NO: 7313 - RNA, 22 nt, Artificial Sequence
  Synthesized RNAi sequence
uaacaauaguuguacauucgac

SEQ ID NO: 7314 - RNA, 22 nt, Artificial Sequence
  Synthesized RNAi sequence
uaacaaugcaguggcaagauaa

SEQ ID NO: 7315 - RNA, 22 nt, Artificial Sequence
  Synthesized RNAi sequence
uaacaauuuagcuccuuucuua

SEQ ID NO: 7316 - RNA, 22 nt, Artificial Sequence
  Synthesized RNAi sequence
uaacaauuuuaccacccuuaag

SEQ ID NO: 7317 - RNA, 22 nt, Artificial Sequence
  Synthesized RNAi sequence
uaacacaucauacaaguugaug

SEQ ID NO: 7318 - RNA, 22 nt, Artificial Sequence
  Synthesized RNAi sequence
uaacaccauuaacaauaguugu

SEQ ID NO: 7319 - RNA, 22 nt, Artificial Sequence
  Synthesized RNAi sequence
uaacacuaucaacgauguaaga

SEQ ID NO: 7320 - RNA, 22 nt, Artificial Sequence
  Synthesized RNAi sequence
uaacagcagcuaaaccaugagu

SEQ ID NO: 7321 - RNA, 22 nt, Artificial Sequence
  Synthesized RNAi sequence
uaacagcaucaggugaagaaac

SEQ ID NO: 7322 - RNA, 22 nt, Artificial Sequence
  Synthesized RNAi sequence
uaacagcuucuacacccuuaag

SEQ ID NO: 7323 - RNA, 22 nt, Artificial Sequence
  Synthesized RNAi sequence
uaacaguauagguugacacaua

SEQ ID NO: 7324 - RNA, 22 nt, Artificial Sequence
  Synthesized RNAi sequence
uaacaguauucuuugcuauagu

SEQ ID NO: 7325 - RNA, 22 nt, Artificial Sequence
  Synthesized RNAi sequence
uaacaguuguuaucugcccauu

SEQ ID NO: 7326 - RNA, 22 nt, Artificial Sequence
  Synthesized RNAi sequence
uaacaucaccuaacucaccuac

SEQ ID NO: 7327 - RNA, 22 nt, Artificial Sequence
  Synthesized RNAi sequence
uaacaucagcuccauccaaaua

SEQ ID NO: 7328 - RNA, 22 nt, Artificial Sequence
  Synthesized RNAi sequence
uaacaugccaaacaauagguuu

SEQ ID NO: 7329 - RNA, 22 nt, Artificial Sequence
  Synthesized RNAi sequence
uaacauuugggccgacaacaug

SEQ ID NO: 7330 - RNA, 22 nt, Artificial Sequence
  Synthesized RNAi sequence
uaaccaaucuucuucuugcucu

SEQ ID NO: 7331 - RNA, 22 nt, Artificial Sequence
  Synthesized RNAi sequence
uaaccacauaagccaagaauua

SEQ ID NO: 7332 - RNA, 22 nt, Artificial Sequence
  Synthesized RNAi sequence
uaaccacuaaaacuauucacuu

SEQ ID NO: 7333 - RNA, 22 nt, Artificial Sequence
  Synthesized RNAi sequence
uaaccaguacaguaagaaggca

SEQ ID NO: 7334 - RNA, 22 nt, Artificial Sequence
  Synthesized RNAi sequence
uaaccaguuaacugguuuaaau

SEQ ID NO: 7335 - RNA, 22 nt, Artificial Sequence
  Synthesized RNAi sequence
uaaccauagcugaaaucggggc

SEQ ID NO: 7336 - RNA, 22 nt, Artificial Sequence
  Synthesized RNAi sequence
uaaccauuauacgcuguaacag

SEQ ID NO: 7337 - RNA, 22 nt, Artificial Sequence
  Synthesized RNAi sequence
uaaccauuuaaacccugacccg

SEQ ID NO: 7338 - RNA, 22 nt, Artificial Sequence
  Synthesized RNAi sequence
uaacuauguuaguaguuguacu

SEQ ID NO: 7339 - RNA, 22 nt, Artificial Sequence
  Synthesized RNAi sequence
uaacucaccuacugucuuauua

SEQ ID NO: 7340 - RNA, 22 nt, Artificial Sequence
  Synthesized RNAi sequence
uaacucauuguuucucuaacau

SEQ ID NO: 7341 - RNA, 22 nt, Artificial Sequence
  Synthesized RNAi sequence
uaacugcaacuuccgcacuauc

SEQ ID NO: 7342 - RNA, 22 nt, Artificial Sequence
  Synthesized RNAi sequence
uaacugcuucaaccaauuauua

SEQ ID NO: 7343 - RNA, 22 nt, Artificial Sequence
  Synthesized RNAi sequence
uaacugguuuuaugguuguugu

SEQ ID NO: 7344 - RNA, 22 nt, Artificial Sequence
  Synthesized RNAi sequence
uaacuguuuucuuuguagaaaa

SEQ ID NO: 7345 - RNA, 22 nt, Artificial Sequence
  Synthesized RNAi sequence
uaacuucaccaucuagguggaa

SEQ ID NO: 7346 - RNA, 22 nt, Artificial Sequence
  Synthesized RNAi sequence
uaacuuccucuuuaggaaucuc

SEQ ID NO: 7347 - RNA, 22 nt, Artificial Sequence
  Synthesized RNAi sequence
uaacuucuaugucagauugaug

SEQ ID NO: 7348 - RNA, 22 nt, Artificial Sequence
  Synthesized RNAi sequence
uaacuucuucaacacaagcuuu

SEQ ID NO: 7349 - RNA, 22 nt, Artificial Sequence
  Synthesized RNAi sequence
uaagaaaaggcuuagcauaauu

SEQ ID NO: 7350 - RNA, 22 nt, Artificial Sequence
  Synthesized RNAi sequence
uaagaaagugaugucaauguca

SEQ ID NO: 7351 - RNA, 22 nt, Artificial Sequence
  Synthesized RNAi sequence
uaagaaagugugcccauguaca

SEQ ID NO: 7352 - RNA, 22 nt, Artificial Sequence
  Synthesized RNAi sequence
uaagaaauucuauaccuaguug

SEQ ID NO: 7353 - RNA, 22 nt, Artificial Sequence
  Synthesized RNAi sequence
uaagaagacuggucaguaggau

SEQ ID NO: 7354 - RNA, 22 nt, Artificial Sequence
  Synthesized RNAi sequence
uaagaaggcaugccuaaauuag

SEQ ID NO: 7355 - RNA, 22 nt, Artificial Sequence
  Synthesized RNAi sequence
uaagaaguugaaugucuucacc

SEQ ID NO: 7356 - RNA, 22 nt, Artificial Sequence
  Synthesized RNAi sequence
uaagaauugucuuucuuauaau

SEQ ID NO: 7357 - RNA, 22 nt, Artificial Sequence
  Synthesized RNAi sequence
uaagacaaacacuacaagguau

SEQ ID NO: 7358 - RNA, 22 nt, Artificial Sequence
  Synthesized RNAi sequence
uaagacauucaacaacaucuuu

SEQ ID NO: 7359 - RNA, 22 nt, Artificial Sequence
  Synthesized RNAi sequence
uaagacauugucuaaggacaca

SEQ ID NO: 7360 - RNA, 22 nt, Artificial Sequence
  Synthesized RNAi sequence
uaagacuagaauugucuacaua

SEQ ID NO: 7361 - RNA, 22 nt, Artificial Sequence
  Synthesized RNAi sequence
uaagauaaccauuauacgcugu

SEQ ID NO: 7362 - RNA, 22 nt, Artificial Sequence
  Synthesized RNAi sequence
uaagauaagugcacaaaaguua

SEQ ID NO: 7363 - RNA, 22 nt, Artificial Sequence
  Synthesized RNAi sequence
uaagauugucaaaggugauaac

SEQ ID NO: 7364 - RNA, 22 nt, Artificial Sequence
  Synthesized RNAi sequence
uaagcacucuuaagaaguugaa

SEQ ID NO: 7365 - RNA, 22 nt, Artificial Sequence
  Synthesized RNAi sequence
uaagcagccauuagaucugugu

SEQ ID NO: 7366 - RNA, 22 nt, Artificial Sequence
  Synthesized RNAi sequence
uaagcaucaaacauuuuaacug

SEQ ID NO: 7367 - RNA, 22 nt, Artificial Sequence
  Synthesized RNAi sequence
uaagcaucuuguagagcaggug

SEQ ID NO: 7368 - RNA, 22 nt, Artificial Sequence
  Synthesized RNAi sequence
uaagccauguguuacauagcca

SEQ ID NO: 7369 - RNA, 22 nt, Artificial Sequence
  Synthesized RNAi sequence
uaagcugacuguaguaaacaga

SEQ ID NO: 7370 - RNA, 22 nt, Artificial Sequence
  Synthesized RNAi sequence
uaaggcauauaauuaguacaaa

SEQ ID NO: 7371 - RNA, 22 nt, Artificial Sequence
  Synthesized RNAi sequence
uaaggcuccugcaacaccuccu

SEQ ID NO: 7372 - RNA, 22 nt, Artificial Sequence
  Synthesized RNAi sequence
uaaggguugucugcuguugucc

SEQ ID NO: 7373 - RNA, 22 nt, Artificial Sequence
  Synthesized RNAi sequence
uaagguaaacauuggcugcauu

SEQ ID NO: 7374 - RNA, 22 nt, Artificial Sequence
  Synthesized RNAi sequence
uaaguaaagcaccgucuaugca

SEQ ID NO: 7375 - RNA, 22 nt, Artificial Sequence
  Synthesized RNAi sequence
uaaguaacugguuuuaugguug

SEQ ID NO: 7376 - RNA, 22 nt, Artificial Sequence
  Synthesized RNAi sequence
uaaguacuuuaucaauccuuuc

SEQ ID NO: 7377 - RNA, 22 nt, Artificial Sequence
  Synthesized RNAi sequence
uaaguagacauuugugcgaaca

SEQ ID NO: 7378 - RNA, 22 nt, Artificial Sequence
  Synthesized RNAi sequence
uaaguaguauguagccauacuc

SEQ ID NO: 7379 - RNA, 22 nt, Artificial Sequence
  Synthesized RNAi sequence
uaaguauaaugucuccuacaac

SEQ ID NO: 7380 - RNA, 22 nt, Artificial Sequence
  Synthesized RNAi sequence
uaagucuuuugaccagcuuuau

SEQ ID NO: 7381 - RNA, 22 nt, Artificial Sequence
  Synthesized RNAi sequence
uaagugcacaaaaguuagcagc

SEQ ID NO: 7382 - RNA, 22 nt, Artificial Sequence
  Synthesized RNAi sequence
uaagugcuaucuuuguuguuac

SEQ ID NO: 7383 - RNA, 22 nt, Artificial Sequence
  Synthesized RNAi sequence
uaagugguccauuaguagcuau

SEQ ID NO: 7384 - RNA, 22 nt, Artificial Sequence
  Synthesized RNAi sequence
uaagugguuauauaauugucug

SEQ ID NO: 7385 - RNA, 22 nt, Artificial Sequence
  Synthesized RNAi sequence
uaaguguguugauaagugacgc

SEQ ID NO: 7386 - RNA, 22 nt, Artificial Sequence
  Synthesized RNAi sequence
uaaguuaacaaaaugagagaga

SEQ ID NO: 7387 - RNA, 22 nt, Artificial Sequence
  Synthesized RNAi sequence
uaaguucauacugagcaggugg

SEQ ID NO: 7388 - RNA, 22 nt, Artificial Sequence
  Synthesized RNAi sequence
uaaguuccaucucuaauugagg

SEQ ID NO: 7389 - RNA, 22 nt, Artificial Sequence
  Synthesized RNAi sequence
uaaguuggaccaaacuguuguc

SEQ ID NO: 7390 - RNA, 22 nt, Artificial Sequence
  Synthesized RNAi sequence
uaaguuuuaaauaaccacuaaa

SEQ ID NO: 7391 - RNA, 22 nt, Artificial Sequence
  Synthesized RNAi sequence
uaauaaaaugaugcaaagaaga

SEQ ID NO: 7392 - RNA, 22 nt, Artificial Sequence
  Synthesized RNAi sequence
uaauaaauguacuaccagcaca

SEQ ID NO: 7393 - RNA, 22 nt, Artificial Sequence
  Synthesized RNAi sequence
uaauaagcaucuuguagagcag

SEQ ID NO: 7394 - RNA, 22 nt, Artificial Sequence
  Synthesized RNAi sequence
uaauaauggugcaaguagaacu

SEQ ID NO: 7395 - RNA, 22 nt, Artificial Sequence
  Synthesized RNAi sequence
uaauaauuguccaacuuagggu

SEQ ID NO: 7396 - RNA, 22 nt, Artificial Sequence
  Synthesized RNAi sequence
uaauacccuuauauuuacgcug

SEQ ID NO: 7397 - RNA, 22 nt, Artificial Sequence
  Synthesized RNAi sequence
uaauacucuagauaauucauua

SEQ ID NO: 7398 - RNA, 22 nt, Artificial Sequence
  Synthesized RNAi sequence
uaauagaugguagaauguaaaa

SEQ ID NO: 7399 - RNA, 22 nt, Artificial Sequence
  Synthesized RNAi sequence
uaauaggaccuuuguauucuga

SEQ ID NO: 7400 - RNA, 22 nt, Artificial Sequence
  Synthesized RNAi sequence
uaauaguaagacuagaauuguc

SEQ ID NO: 7401 - RNA, 22 nt, Artificial Sequence
  Synthesized RNAi sequence
uaauaguccucacuucucucaa

SEQ ID NO: 7402 - RNA, 22 nt, Artificial Sequence
  Synthesized RNAi sequence
uaauauacacuuuuaucaccuc

SEQ ID NO: 7403 - RNA, 22 nt, Artificial Sequence
  Synthesized RNAi sequence
uaauaugacgcgcacuacaguc

SEQ ID NO: 7404 - RNA, 22 nt, Artificial Sequence
  Synthesized RNAi sequence
uaaucaaccacacccucuugua

SEQ ID NO: 7405 - RNA, 22 nt, Artificial Sequence
  Synthesized RNAi sequence
uaaucaauagccaccacaucac

SEQ ID NO: 7406 - RNA, 22 nt, Artificial Sequence
  Synthesized RNAi sequence
uaaucaucuucaguaccauacu

SEQ ID NO: 7407 - RNA, 22 nt, Artificial Sequence
  Synthesized RNAi sequence
uaaugccugaucuaguaacagu

SEQ ID NO: 7408 - RNA, 22 nt, Artificial Sequence
  Synthesized RNAi sequence
uaauggugcaaguagaacuucg

SEQ ID NO: 7409 - RNA, 22 nt, Artificial Sequence
  Synthesized RNAi sequence
uaaugucuccuacaacuucggu

SEQ ID NO: 7410 - RNA, 22 nt, Artificial Sequence
  Synthesized RNAi sequence
uaauguugucuacuguuguaaa

SEQ ID NO: 7411 - RNA, 22 nt, Artificial Sequence
  Synthesized RNAi sequence
uaauuaaaugaagccucuagac

SEQ ID NO: 7412 - RNA, 22 nt, Artificial Sequence
  Synthesized RNAi sequence
uaauuaacugcuucaaccaauu

SEQ ID NO: 7413 - RNA, 22 nt, Artificial Sequence
  Synthesized RNAi sequence
uaauuaccaguguacucacuag

SEQ ID NO: 7414 - RNA, 22 nt, Artificial Sequence
  Synthesized RNAi sequence
uaauuagcuauaguaucccaag

SEQ ID NO: 7415 - RNA, 22 nt, Artificial Sequence
  Synthesized RNAi sequence
uaauuaguacaaacacgguuua

SEQ ID NO: 7416 - RNA, 22 nt, Artificial Sequence
  Synthesized RNAi sequence
uaauuauuaaccacauaagcca

SEQ ID NO: 7417 - RNA, 22 nt, Artificial Sequence
  Synthesized RNAi sequence
uaauucuagaauuuguacuucu

SEQ ID NO: 7418 - RNA, 22 nt, Artificial Sequence
  Synthesized RNAi sequence
uaauuguccaacuuagggucaa

SEQ ID NO: 7419 - RNA, 22 nt, Artificial Sequence
  Synthesized RNAi sequence
uaauuugcguguuucuucugca

SEQ ID NO: 7420 - RNA, 22 nt, Artificial Sequence
  Synthesized RNAi sequence
uacaaacacgguuuaaacaccg

SEQ ID NO: 7421 - RNA, 22 nt, Artificial Sequence
  Synthesized RNAi sequence
uacaaacuuaaaauuaucgaag

SEQ ID NO: 7422 - RNA, 22 nt, Artificial Sequence
  Synthesized RNAi sequence
uacaacauuaacaacuugucua

SEQ ID NO: 7423 - RNA, 22 nt, Artificial Sequence
  Synthesized RNAi sequence
uacaaccgucuacaacaugcac

SEQ ID NO: 7424 - RNA, 22 nt, Artificial Sequence
  Synthesized RNAi sequence
uacaacuaucgccaguaacuuc

SEQ ID NO: 7425 - RNA, 22 nt, Artificial Sequence
  Synthesized RNAi sequence
uacaacuucgguaguuuucaca

SEQ ID NO: 7426 - RNA, 22 nt, Artificial Sequence
  Synthesized RNAi sequence
uacaagauuaauuauuaaccac

SEQ ID NO: 7427 - RNA, 22 nt, Artificial Sequence
  Synthesized RNAi sequence
uacaagcaccaaggucacgggg

SEQ ID NO: 7428 - RNA, 22 nt, Artificial Sequence
  Synthesized RNAi sequence
uacaagguauagaaccaguaca

SEQ ID NO: 7429 - RNA, 22 nt, Artificial Sequence
  Synthesized RNAi sequence
uacaagguaucugaacaccuuu

SEQ ID NO: 7430 - RNA, 22 nt, Artificial Sequence
  Synthesized RNAi sequence
uacaaguugaugaauuacaacc

SEQ ID NO: 7431 - RNA, 22 nt, Artificial Sequence
  Synthesized RNAi sequence
uacacaaacucuuaaagaaugu

SEQ ID NO: 7432 - RNA, 22 nt, Artificial Sequence
  Synthesized RNAi sequence
uacacaccacguucaagacucu

SEQ ID NO: 7433 - RNA, 22 nt, Artificial Sequence
  Synthesized RNAi sequence
uacaccagguauuugguuuaua

SEQ ID NO: 7434 - RNA, 22 nt, Artificial Sequence
  Synthesized RNAi sequence
uacacccuuaaggguugucugc

SEQ ID NO: 7435 - RNA, 22 nt, Artificial Sequence
  Synthesized RNAi sequence
uacacucaagaacgucuuucug

SEQ ID NO: 7436 - RNA, 22 nt, Artificial Sequence
  Synthesized RNAi sequence
uacacuuuuaucaccucucuua

SEQ ID NO: 7437 - RNA, 22 nt, Artificial Sequence
  Synthesized RNAi sequence
uacaguaggcuaagauaagugc

SEQ ID NO: 7438 - RNA, 22 nt, Artificial Sequence
  Synthesized RNAi sequence
uacaguagguugcaauagugac

SEQ ID NO: 7439 - RNA, 22 nt, Artificial Sequence
  Synthesized RNAi sequence
uacagucaauacaagcaccaag

SEQ ID NO: 7440 - RNA, 22 nt, Artificial Sequence
  Synthesized RNAi sequence
uacaguguaaccauuuaaaccc

SEQ ID NO: 7441 - RNA, 22 nt, Artificial Sequence
  Synthesized RNAi sequence
uacaguuguuuuacugguguaa

SEQ ID NO: 7442 - RNA, 22 nt, Artificial Sequence
  Synthesized RNAi sequence
uacauaacagcuucuacacccu

SEQ ID NO: 7443 - RNA, 22 nt, Artificial Sequence
  Synthesized RNAi sequence
uacauaagcagccauuagaucu

SEQ ID NO: 7444 - RNA, 22 nt, Artificial Sequence
  Synthesized RNAi sequence
uacauaauaaaaugaugcaaag

SEQ ID NO: 7445 - RNA, 22 nt, Artificial Sequence
  Synthesized RNAi sequence
uacauagccaaguggcauugua

SEQ ID NO: 7446 - RNA, 22 nt, Artificial Sequence
  Synthesized RNAi sequence
uacauaugugaagccaauuuaa

SEQ ID NO: 7447 - RNA, 22 nt, Artificial Sequence
  Synthesized RNAi sequence
uacaucugaaucaacaaacccu

SEQ ID NO: 7448 - RNA, 22 nt, Artificial Sequence
  Synthesized RNAi sequence
uacauucgacucuuguugcucu

SEQ ID NO: 7449 - RNA, 22 nt, Artificial Sequence
  Synthesized RNAi sequence
uacauucuaaccauagcugaaa

SEQ ID NO: 7450 - RNA, 22 nt, Artificial Sequence
  Synthesized RNAi sequence
uaccacacguacaagguaucug

SEQ ID NO: 7451 - RNA, 22 nt, Artificial Sequence
  Synthesized RNAi sequence
uaccacccacuuuaaguggucc

SEQ ID NO: 7452 - RNA, 22 nt, Artificial Sequence
  Synthesized RNAi sequence
uaccacccuuaagugcuaucuu

SEQ ID NO: 7453 - RNA, 22 nt, Artificial Sequence
  Synthesized RNAi sequence
uaccagcacagaauguaucaca

SEQ ID NO: 7454 - RNA, 22 nt, Artificial Sequence
  Synthesized RNAi sequence
uaccaguguacucacuagcaca

SEQ ID NO: 7455 - RNA, 22 nt, Artificial Sequence
  Synthesized RNAi sequence
uaccauacucauauugaguuga

SEQ ID NO: 7456 - RNA, 22 nt, Artificial Sequence
  Synthesized RNAi sequence
uaccaugcuuaaguucauacug

SEQ ID NO: 7457 - RNA, 22 nt, Artificial Sequence
  Synthesized RNAi sequence
uacccagaaaacuaggaucagu

SEQ ID NO: 7458 - RNA, 22 nt, Artificial Sequence
  Synthesized RNAi sequence
uacccuuauauuuacgcuguau

SEQ ID NO: 7459 - RNA, 22 nt, Artificial Sequence
  Synthesized RNAi sequence
uaccgacacucuuaacaguauu

SEQ ID NO: 7460 - RNA, 22 nt, Artificial Sequence
  Synthesized RNAi sequence
uaccgagcagcuucuuccaaau

SEQ ID NO: 7461 - RNA, 22 nt, Artificial Sequence
  Synthesized RNAi sequence
uaccgaguucaacuguauaggc

SEQ ID NO: 7462 - RNA, 22 nt, Artificial Sequence
  Synthesized RNAi sequence
uaccuaguuguguagauugucc

SEQ ID NO: 7463 - RNA, 22 nt, Artificial Sequence
  Synthesized RNAi sequence
uaccuccauuagcauagacaua

SEQ ID NO: 7464 - RNA, 22 nt, Artificial Sequence
  Synthesized RNAi sequence
uaccuucaugugaauuaugagg

SEQ ID NO: 7465 - RNA, 22 nt, Artificial Sequence
  Synthesized RNAi sequence
uaccuugguaaucaucuucagu

SEQ ID NO: 7466 - RNA, 22 nt, Artificial Sequence
  Synthesized RNAi sequence
uacgcuguaacagcaucaggug

SEQ ID NO: 7467 - RNA, 22 nt, Artificial Sequence
  Synthesized RNAi sequence
uacgcuguauaguugaaacuau

SEQ ID NO: 7468 - RNA, 22 nt, Artificial Sequence
  Synthesized RNAi sequence
uacguggcuuuauuaguugcau

SEQ ID NO: 7469 - RNA, 22 nt, Artificial Sequence
  Synthesized RNAi sequence
uacguuuguaacacaucauaca

SEQ ID NO: 7470 - RNA, 22 nt, Artificial Sequence
  Synthesized RNAi sequence
uacuaacaacuuuguuaagaaa

SEQ ID NO: 7471 - RNA, 22 nt, Artificial Sequence
  Synthesized RNAi sequence
uacuaccagcacagaauguauc

SEQ ID NO: 7472 - RNA, 22 nt, Artificial Sequence
  Synthesized RNAi sequence
uacuagauauuuuguagcuugu

SEQ ID NO: 7473 - RNA, 22 nt, Artificial Sequence
  Synthesized RNAi sequence
uacucaaaagccucaacacgua

SEQ ID NO: 7474 - RNA, 22 nt, Artificial Sequence
  Synthesized RNAi sequence
uacucacuagcacaaguaaaug

SEQ ID NO: 7475 - RNA, 22 nt, Artificial Sequence
  Synthesized RNAi sequence
uacucauauugaguugauggcu

SEQ ID NO: 7476 - RNA, 22 nt, Artificial Sequence
  Synthesized RNAi sequence
uacucuagauaauucauuaggu

SEQ ID NO: 7477 - RNA, 22 nt, Artificial Sequence
  Synthesized RNAi sequence
uacugagcagguggugcugaca

SEQ ID NO: 7478 - RNA, 22 nt, Artificial Sequence
  Synthesized RNAi sequence
uacugguguaaaaguaaaaucu

SEQ ID NO: 7479 - RNA, 22 nt, Artificial Sequence
  Synthesized RNAi sequence
uacugucuuauuacaguaggcu

SEQ ID NO: 7480 - RNA, 22 nt, Artificial Sequence
  Synthesized RNAi sequence
uacuguuguaaacaccuuaaua

SEQ ID NO: 7481 - RNA, 22 nt, Artificial Sequence
  Synthesized RNAi sequence
uacuucuguaccgaguucaacu

SEQ ID NO: 7482 - RNA, 22 nt, Artificial Sequence
  Synthesized RNAi sequence
uacuuuaucaauccuuucauca

SEQ ID NO: 7483 - RNA, 22 nt, Artificial Sequence
  Synthesized RNAi sequence
uacuuucaguuauaaauggcuu

SEQ ID NO: 7484 - RNA, 22 nt, Artificial Sequence
  Synthesized RNAi sequence
uagaaaacauccguaauaggac

SEQ ID NO: 7485 - RNA, 22 nt, Artificial Sequence
  Synthesized RNAi sequence
uagaaagaacaauacauaugug

SEQ ID NO: 7486 - RNA, 22 nt, Artificial Sequence
  Synthesized RNAi sequence
uagaaccaguacaguagguugc

SEQ ID NO: 7487 - RNA, 22 nt, Artificial Sequence
  Synthesized RNAi sequence
uagaacuucgugcugauuaaaa

SEQ ID NO: 7488 - RNA, 22 nt, Artificial Sequence
  Synthesized RNAi sequence
uagaagaagaaguaagauaacc

SEQ ID NO: 7489 - RNA, 22 nt, Artificial Sequence
  Synthesized RNAi sequence
uagaaguuauauguuuauagug

SEQ ID NO: 7490 - RNA, 22 nt, Artificial Sequence
  Synthesized RNAi sequence
uagaauugucuacauaagcagc

SEQ ID NO: 7491 - RNA, 22 nt, Artificial Sequence
  Synthesized RNAi sequence
uagacaaaauuuaccgacacuc

SEQ ID NO: 7492 - RNA, 22 nt, Artificial Sequence
  Synthesized RNAi sequence
uagacauaaaaggaccuucuaa

SEQ ID NO: 7493 - RNA, 22 nt, Artificial Sequence
  Synthesized RNAi sequence
uagacauuaaaacaccuaaagc

SEQ ID NO: 7494 - RNA, 22 nt, Artificial Sequence
  Synthesized RNAi sequence
uagacauuugugcgaacaguau

SEQ ID NO: 7495 - RNA, 22 nt, Artificial Sequence
  Synthesized RNAi sequence
uagagauaauagaugguagaau

SEQ ID NO: 7496 - RNA, 22 nt, Artificial Sequence
  Synthesized RNAi sequence
uagagcagguggauuaaacuuc

SEQ ID NO: 7497 - RNA, 22 nt, Artificial Sequence
  Synthesized RNAi sequence
uagagugucaucauuagguaaa

SEQ ID NO: 7498 - RNA, 22 nt, Artificial Sequence
  Synthesized RNAi sequence
uagaguucaaauagccuucucu

SEQ ID NO: 7499 - RNA, 22 nt, Artificial Sequence
  Synthesized RNAi sequence
uagauaagacauugucuaagga

SEQ ID NO: 7500 - RNA, 22 nt, Artificial Sequence
  Synthesized RNAi sequence
uagauaauucauuagguuucuu

SEQ ID NO: 7501 - RNA, 22 nt, Artificial Sequence
  Synthesized RNAi sequence
uagauauuuuguagcuuguuua

SEQ ID NO: 7502 - RNA, 22 nt, Artificial Sequence
  Synthesized RNAi sequence
uagaucguuaaguguguugaua

SEQ ID NO: 7503 - RNA, 22 nt, Artificial Sequence
  Synthesized RNAi sequence
uagaucuucgcaggcaagauua

SEQ ID NO: 7504 - RNA, 22 nt, Artificial Sequence
  Synthesized RNAi sequence
uagaugguagaauguaaaaggc

SEQ ID NO: 7505 - RNA, 22 nt, Artificial Sequence
  Synthesized RNAi sequence
uagauuaaagaaccuaggcaaa

SEQ ID NO: 7506 - RNA, 22 nt, Artificial Sequence
  Synthesized RNAi sequence
uagauuguccagaauaggacca

SEQ ID NO: 7507 - RNA, 22 nt, Artificial Sequence
  Synthesized RNAi sequence
uagcaagauuguguccgcuuaa

SEQ ID NO: 7508 - RNA, 22 nt, Artificial Sequence
  Synthesized RNAi sequence
uagcaaggguuuucaaaccuaa

SEQ ID NO: 7509 - RNA, 22 nt, Artificial Sequence
  Synthesized RNAi sequence
uagcacaaguaaauguaccaug

SEQ ID NO: 7510 - RNA, 22 nt, Artificial Sequence
  Synthesized RNAi sequence
uagcaccauaaucaaccacacc

SEQ ID NO: 7511 - RNA, 22 nt, Artificial Sequence
  Synthesized RNAi sequence
uagcagcuucaccagcccuugc

SEQ ID NO: 7512 - RNA, 22 nt, Artificial Sequence
  Synthesized RNAi sequence
uagcauaauuagcuauaguauc

SEQ ID NO: 7513 - RNA, 22 nt, Artificial Sequence
  Synthesized RNAi sequence
uagcauagacauaaaaggaccu

SEQ ID NO: 7514 - RNA, 22 nt, Artificial Sequence
  Synthesized RNAi sequence
uagccaaguggcauuguaacaa

SEQ ID NO: 7515 - RNA, 22 nt, Artificial Sequence
  Synthesized RNAi sequence
uagccauacuccacucaucuaa

SEQ ID NO: 7516 - RNA, 22 nt, Artificial Sequence
  Synthesized RNAi sequence
uagccuuauuuaaggcuccugc

SEQ ID NO: 7517 - RNA, 22 nt, Artificial Sequence
  Synthesized RNAi sequence
uagccuucucuguaaccaguac

SEQ ID NO: 7518 - RNA, 22 nt, Artificial Sequence
  Synthesized RNAi sequence
uagcuauaguaucccaagggac

SEQ ID NO: 7519 - RNA, 22 nt, Artificial Sequence
  Synthesized RNAi sequence
uagcuauguaaucaucagauuc

SEQ ID NO: 7520 - RNA, 22 nt, Artificial Sequence
  Synthesized RNAi sequence
uagcuccuuucuuaaaagaggg

SEQ ID NO: 7521 - RNA, 22 nt, Artificial Sequence
  Synthesized RNAi sequence
uagcucucagguugucuaaguu

SEQ ID NO: 7522 - RNA, 22 nt, Artificial Sequence
  Synthesized RNAi sequence
uagcugaaaucggggccauuug

SEQ ID NO: 7523 - RNA, 22 nt, Artificial Sequence
  Synthesized RNAi sequence
uagcuggcacuuugagagaucu

SEQ ID NO: 7524 - RNA, 22 nt, Artificial Sequence
  Synthesized RNAi sequence
uagcuuguuuaccacacguaca

SEQ ID NO: 7525 - RNA, 22 nt, Artificial Sequence
  Synthesized RNAi sequence
uaggaaccagcaagugagaugg

SEQ ID NO: 7526 - RNA, 22 nt, Artificial Sequence
  Synthesized RNAi sequence
uaggaccaaucuuuauaggaac

SEQ ID NO: 7527 - RNA, 22 nt, Artificial Sequence
  Synthesized RNAi sequence
uaggaccuuuguauucugagga

SEQ ID NO: 7528 - RNA, 22 nt, Artificial Sequence
  Synthesized RNAi sequence
uaggaucaguugugugguagua

SEQ ID NO: 7529 - RNA, 22 nt, Artificial Sequence
  Synthesized RNAi sequence
uaggauuacuaguguaauauac

SEQ ID NO: 7530 - RNA, 22 nt, Artificial Sequence
  Synthesized RNAi sequence
uaggauuuauuggucuuuuaaa

SEQ ID NO: 7531 - RNA, 22 nt, Artificial Sequence
  Synthesized RNAi sequence
uaggcaaugaaccuuuaguguu

SEQ ID NO: 7532 - RNA, 22 nt, Artificial Sequence
  Synthesized RNAi sequence
uaggcagagcacuucucauuaa

SEQ ID NO: 7533 - RNA, 22 nt, Artificial Sequence
  Synthesized RNAi sequence
uaggcuaagauaagugcacaaa

SEQ ID NO: 7534 - RNA, 22 nt, Artificial Sequence
  Synthesized RNAi sequence
uagggucaauuucuguacaaac

SEQ ID NO: 7535 - RNA, 22 nt, Artificial Sequence
  Synthesized RNAi sequence
uaggugagcauauaguuauuac

SEQ ID NO: 7536 - RNA, 22 nt, Artificial Sequence
  Synthesized RNAi sequence
uagguggaaugugguaggauua

SEQ ID NO: 7537 - RNA, 22 nt, Artificial Sequence
  Synthesized RNAi sequence
uaggugucuaaagaaucuaaac

SEQ ID NO: 7538 - RNA, 22 nt, Artificial Sequence
  Synthesized RNAi sequence
uagguugacacauaagcugacu

SEQ ID NO: 7539 - RNA, 22 nt, Artificial Sequence
  Synthesized RNAi sequence
uagguugcaauagugacauuag

SEQ ID NO: 7540 - RNA, 22 nt, Artificial Sequence
  Synthesized RNAi sequence
uagguuuauguaacaauuuagc

SEQ ID NO: 7541 - RNA, 22 nt, Artificial Sequence
  Synthesized RNAi sequence
uagguuucuuaauaguaagacu

SEQ ID NO: 7542 - RNA, 22 nt, Artificial Sequence
  Synthesized RNAi sequence
uaguaacaguauagguugacac

SEQ ID NO: 7543 - RNA, 22 nt, Artificial Sequence
  Synthesized RNAi sequence
uaguaacaucagcuccauccaa

SEQ ID NO: 7544 - RNA, 22 nt, Artificial Sequence
  Synthesized RNAi sequence
uaguaagacuagaauugucuac

SEQ ID NO: 7545 - RNA, 22 nt, Artificial Sequence
  Synthesized RNAi sequence
uaguacaaacacgguuuaaaca

SEQ ID NO: 7546 - RNA, 22 nt, Artificial Sequence
  Synthesized RNAi sequence
uaguacucaaaagccucaacac

SEQ ID NO: 7547 - RNA, 22 nt, Artificial Sequence
  Synthesized RNAi sequence
uaguagaguucaaauagccuuc

SEQ ID NO: 7548 - RNA, 22 nt, Artificial Sequence
  Synthesized RNAi sequence
uaguagccuuauuuaaggcucc

SEQ ID NO: 7549 - RNA, 22 nt, Artificial Sequence
  Synthesized RNAi sequence
uaguagcuauguaaucaucaga

SEQ ID NO: 7550 - RNA, 22 nt, Artificial Sequence
  Synthesized RNAi sequence
uaguagucggcauagaugcuuu

SEQ ID NO: 7551 - RNA, 22 nt, Artificial Sequence
  Synthesized RNAi sequence
uaguaguugcacaugucaacuu

SEQ ID NO: 7552 - RNA, 22 nt, Artificial Sequence
  Synthesized RNAi sequence
uaguaguuguacuaacaacuuu

SEQ ID NO: 7553 - RNA, 22 nt, Artificial Sequence
  Synthesized RNAi sequence
uaguaucccaagggacacuauu

SEQ ID NO: 7554 - RNA, 22 nt, Artificial Sequence
  Synthesized RNAi sequence
uaguauguagccauacuccacu

SEQ ID NO: 7555 - RNA, 22 nt, Artificial Sequence
  Synthesized RNAi sequence
uaguccucacuucucucaaaga

SEQ ID NO: 7556 - RNA, 22 nt, Artificial Sequence
  Synthesized RNAi sequence
uagucggcauagaugcuuuaau

SEQ ID NO: 7557 - RNA, 22 nt, Artificial Sequence
  Synthesized RNAi sequence
uagucugaacaacugguguaag

SEQ ID NO: 7558 - RNA, 22 nt, Artificial Sequence
  Synthesized RNAi sequence
uagugacaagucucucgcaacu

SEQ ID NO: 7559 - RNA, 22 nt, Artificial Sequence
  Synthesized RNAi sequence
uagugacauuaguagaguucaa

SEQ ID NO: 7560 - RNA, 22 nt, Artificial Sequence
  Synthesized RNAi sequence
uagugaccacacugguaauuac

SEQ ID NO: 7561 - RNA, 22 nt, Artificial Sequence
  Synthesized RNAi sequence
uaguguaauauacacuuuuauc

SEQ ID NO: 7562 - RNA, 22 nt, Artificial Sequence
  Synthesized RNAi sequence
uaguguuauuagcucucagguu

SEQ ID NO: 7563 - RNA, 22 nt, Artificial Sequence
  Synthesized RNAi sequence
uaguguuuauaaucaauagcca

SEQ ID NO: 7564 - RNA, 22 nt, Artificial Sequence
  Synthesized RNAi sequence
uaguuauuacaacuaucgccag

SEQ ID NO: 7565 - RNA, 22 nt, Artificial Sequence
  Synthesized RNAi sequence
uaguugaaacuauggcuuuagu

SEQ ID NO: 7566 - RNA, 22 nt, Artificial Sequence
  Synthesized RNAi sequence
uaguugcacaugucaacuuaaa

SEQ ID NO: 7567 - RNA, 22 nt, Artificial Sequence
  Synthesized RNAi sequence
uaguuguacauucgacucuugu

SEQ ID NO: 7568 - RNA, 22 nt, Artificial Sequence
  Synthesized RNAi sequence
uaguuguacuaacaacuuuguu

SEQ ID NO: 7569 - RNA, 22 nt, Artificial Sequence
  Synthesized RNAi sequence
uaguugucugauuguccucacu

SEQ ID NO: 7570 - RNA, 22 nt, Artificial Sequence
  Synthesized RNAi sequence
uaguuguguagauuguccagaa

SEQ ID NO: 7571 - RNA, 22 nt, Artificial Sequence
  Synthesized RNAi sequence
uaguuguucagacaaugacaug

SEQ ID NO: 7572 - RNA, 22 nt, Artificial Sequence
  Synthesized RNAi sequence
uaguuuccacacagacaggcau

SEQ ID NO: 7573 - RNA, 22 nt, Artificial Sequence
  Synthesized RNAi sequence
uaguuucuaaagaaggauaggu

SEQ ID NO: 7574 - RNA, 22 nt, Artificial Sequence
  Synthesized RNAi sequence
uaguuucuacaucugaaucaac

SEQ ID NO: 7575 - RNA, 22 nt, Artificial Sequence
  Synthesized RNAi sequence
uaguuucuuccagaguuguugu

SEQ ID NO: 7576 - RNA, 22 nt, Artificial Sequence
  Synthesized RNAi sequence
uaguuuucacauuacacucaag

SEQ ID NO: 7577 - RNA, 22 nt, Artificial Sequence
  Synthesized RNAi sequence
uauaaaguaacaaguuuucugu

SEQ ID NO: 7578 - RNA, 22 nt, Artificial Sequence
  Synthesized RNAi sequence
uauaaauggcuuaacuuccucu

SEQ ID NO: 7579 - RNA, 22 nt, Artificial Sequence
  Synthesized RNAi sequence
uauaaccaguuaacugguuuaa

SEQ ID NO: 7580 - RNA, 22 nt, Artificial Sequence
  Synthesized RNAi sequence
uauaaguaacugguuuuauggu

SEQ ID NO: 7581 - RNA, 22 nt, Artificial Sequence
  Synthesized RNAi sequence
uauaauaauuguccaacuuagg

SEQ ID NO: 7582 - RNA, 22 nt, Artificial Sequence
  Synthesized RNAi sequence
uauaaugucuccuacaacuucg

SEQ ID NO: 7583 - RNA, 22 nt, Artificial Sequence
  Synthesized RNAi sequence
uauaauuaguacaaacacgguu

SEQ ID NO: 7584 - RNA, 22 nt, Artificial Sequence
  Synthesized RNAi sequence
uauaauugucuguuggcacuuu

SEQ ID NO: 7585 - RNA, 22 nt, Artificial Sequence
  Synthesized RNAi sequence
uauacaccagguauuugguuua

SEQ ID NO: 7586 - RNA, 22 nt, Artificial Sequence
  Synthesized RNAi sequence
uauacacuuuuaucaccucucu

SEQ ID NO: 7587 - RNA, 22 nt, Artificial Sequence
  Synthesized RNAi sequence
uauaccgagcagcuucuuccaa

SEQ ID NO: 7588 - RNA, 22 nt, Artificial Sequence
  Synthesized RNAi sequence
uauaccuaguuguguagauugu

SEQ ID NO: 7589 - RNA, 22 nt, Artificial Sequence
  Synthesized RNAi sequence
uauacgcuguaacagcaucagg

SEQ ID NO: 7590 - RNA, 22 nt, Artificial Sequence
  Synthesized RNAi sequence
uauacguggcuuuauuaguugc

SEQ ID NO: 7591 - RNA, 22 nt, Artificial Sequence
  Synthesized RNAi sequence
uauagaaccaguacaguagguu

SEQ ID NO: 7592 - RNA, 22 nt, Artificial Sequence
  Synthesized RNAi sequence
uauaggaaccagcaagugagau

SEQ ID NO: 7593 - RNA, 22 nt, Artificial Sequence
  Synthesized RNAi sequence
uauaggcagagcacuucucauu

SEQ ID NO: 7594 - RNA, 22 nt, Artificial Sequence
  Synthesized RNAi sequence
uauaggugagcauauaguuauu

SEQ ID NO: 7595 - RNA, 22 nt, Artificial Sequence
  Synthesized RNAi sequence
uauagguugacacauaagcuga

SEQ ID NO: 7596 - RNA, 22 nt, Artificial Sequence
  Synthesized RNAi sequence
uauaguagucggcauagaugcu

SEQ ID NO: 7597 - RNA, 22 nt, Artificial Sequence
  Synthesized RNAi sequence
uauaguaucccaagggacacua

SEQ ID NO: 7598 - RNA, 22 nt, Artificial Sequence
  Synthesized RNAi sequence
uauagugaccacacugguaauu

SEQ ID NO: 7599 - RNA, 22 nt, Artificial Sequence
  Synthesized RNAi sequence
uauaguuauuacaacuaucgcc

SEQ ID NO: 7600 - RNA, 22 nt, Artificial Sequence
  Synthesized RNAi sequence
uauaguugaaacuauggcuuua

SEQ ID NO: 7601 - RNA, 22 nt, Artificial Sequence
  Synthesized RNAi sequence
uauaguuucuaaagaaggauag

SEQ ID NO: 7602 - RNA, 22 nt, Artificial Sequence
  Synthesized RNAi sequence
uauauaauugucuguuggcacu

SEQ ID NO: 7603 - RNA, 22 nt, Artificial Sequence
  Synthesized RNAi sequence
uauauauggagcaucuuucuuu

SEQ ID NO: 7604 - RNA, 22 nt, Artificial Sequence
  Synthesized RNAi sequence
uauauguuuauagugaccacac

SEQ ID NO: 7605 - RNA, 22 nt, Artificial Sequence
  Synthesized RNAi sequence
uauauuuacgcuguauaguuga

SEQ ID NO: 7606 - RNA, 22 nt, Artificial Sequence
  Synthesized RNAi sequence
uaucaaaguaaagauggaugga

SEQ ID NO: 7607 - RNA, 22 nt, Artificial Sequence
  Synthesized RNAi sequence
uaucaacgauguaagaagacug

SEQ ID NO: 7608 - RNA, 22 nt, Artificial Sequence
  Synthesized RNAi sequence
uaucaauccuuucaucaaguuc

SEQ ID NO: 7609 - RNA, 22 nt, Artificial Sequence
  Synthesized RNAi sequence
uaucacagugucaucaccaaaa

SEQ ID NO: 7610 - RNA, 22 nt, Artificial Sequence
  Synthesized RNAi sequence
uaucacauacaaacuuaaaauu

SEQ ID NO: 7611 - RNA, 22 nt, Artificial Sequence
  Synthesized RNAi sequence
uaucaccaacaucagacacuaa

SEQ ID NO: 7612 - RNA, 22 nt, Artificial Sequence
  Synthesized RNAi sequence
uaucaccucucuuaagaaauuc

SEQ ID NO: 7613 - RNA, 22 nt, Artificial Sequence
  Synthesized RNAi sequence
uaucaucaucuaaccaaucuuc

SEQ ID NO: 7614 - RNA, 22 nt, Artificial Sequence
  Synthesized RNAi sequence
uaucaucuuguuuucucuguuc

SEQ ID NO: 7615 - RNA, 22 nt, Artificial Sequence
  Synthesized RNAi sequence
uauccauucccugcgcguccuc

SEQ ID NO: 7616 - RNA, 22 nt, Artificial Sequence
  Synthesized RNAi sequence
uaucccaagggacacuauuaac

SEQ ID NO: 7617 - RNA, 22 nt, Artificial Sequence
  Synthesized RNAi sequence
uaucgaagcuugcguuuggaua

SEQ ID NO: 7618 - RNA, 22 nt, Artificial Sequence
  Synthesized RNAi sequence
uaucgccaguaacuucuauguc

SEQ ID NO: 7619 - RNA, 22 nt, Artificial Sequence
  Synthesized RNAi sequence
uaucuacacaaacucuuaaaga

SEQ ID NO: 7620 - RNA, 22 nt, Artificial Sequence
  Synthesized RNAi sequence
uaucugaacaccuuucuuaaau

SEQ ID NO: 7621 - RNA, 22 nt, Artificial Sequence
  Synthesized RNAi sequence
uaucugcccauuuaauagaagu

SEQ ID NO: 7622 - RNA, 22 nt, Artificial Sequence
  Synthesized RNAi sequence
uaucuuuguuguuacaacauua

SEQ ID NO: 7623 - RNA, 22 nt, Artificial Sequence
  Synthesized RNAi sequence
uaugagguuuuauuuuaguaac

SEQ ID NO: 7624 - RNA, 22 nt, Artificial Sequence
  Synthesized RNAi sequence
uaugcaauacaaaguuucuuua

SEQ ID NO: 7625 - RNA, 22 nt, Artificial Sequence
  Synthesized RNAi sequence
uauggagcaucuuucuuuaaga

SEQ ID NO: 7626 - RNA, 22 nt, Artificial Sequence
  Synthesized RNAi sequence
uaugguaggauuuuccacuacu

SEQ ID NO: 7627 - RNA, 22 nt, Artificial Sequence
  Synthesized RNAi sequence
uaugguuguuguguaacuguuu

SEQ ID NO: 7628 - RNA, 22 nt, Artificial Sequence
  Synthesized RNAi sequence
uauguaacaauuuagcuccuuu

SEQ ID NO: 7629 - RNA, 22 nt, Artificial Sequence
  Synthesized RNAi sequence
uauguaaucaucagauucaacu

SEQ ID NO: 7630 - RNA, 22 nt, Artificial Sequence
  Synthesized RNAi sequence
uauguagccauacuccacucau

SEQ ID NO: 7631 - RNA, 22 nt, Artificial Sequence
  Synthesized RNAi sequence
uaugucauugacauguccacaa

SEQ ID NO: 7632 - RNA, 22 nt, Artificial Sequence
  Synthesized RNAi sequence
uaugugaagccaauuuaaacuc

SEQ ID NO: 7633 - RNA, 22 nt, Artificial Sequence
  Synthesized RNAi sequence
uauguuaguaguuguacuaaca

SEQ ID NO: 7634 - RNA, 22 nt, Artificial Sequence
  Synthesized RNAi sequence
uauguuuauagugaccacacug

SEQ ID NO: 7635 - RNA, 22 nt, Artificial Sequence
  Synthesized RNAi sequence
uauuaacaauuuuaccacccuu

SEQ ID NO: 7636 - RNA, 22 nt, Artificial Sequence
  Synthesized RNAi sequence
uauuaacagcagcuaaaccaug

SEQ ID NO: 7637 - RNA, 22 nt, Artificial Sequence
  Synthesized RNAi sequence
uauuaaccacauaagccaagaa

SEQ ID NO: 7638 - RNA, 22 nt, Artificial Sequence
  Synthesized RNAi sequence
uauuaacguaagcaucaaacau

SEQ ID NO: 7639 - RNA, 22 nt, Artificial Sequence
  Synthesized RNAi sequence
uauuacaacuaucgccaguaac

SEQ ID NO: 7640 - RNA, 22 nt, Artificial Sequence
  Synthesized RNAi sequence
uauuacaguaggcuaagauaag

SEQ ID NO: 7641 - RNA, 22 nt, Artificial Sequence
  Synthesized RNAi sequence
uauuacguuuguaacacaucau

SEQ ID NO: 7642 - RNA, 22 nt, Artificial Sequence
  Synthesized RNAi sequence
uauuagcucucagguugucuaa

SEQ ID NO: 7643 - RNA, 22 nt, Artificial Sequence
  Synthesized RNAi sequence
uauuaguugcauuguuaacaug

SEQ ID NO: 7644 - RNA, 22 nt, Artificial Sequence
  Synthesized RNAi sequence
uauuaucacauacaaacuuaaa

SEQ ID NO: 7645 - RNA, 22 nt, Artificial Sequence
  Synthesized RNAi sequence
uauucacacucuuguaaccuug

SEQ ID NO: 7646 - RNA, 22 nt, Artificial Sequence
  Synthesized RNAi sequence
uauucugaggacuuuguaagua

SEQ ID NO: 7647 - RNA, 22 nt, Artificial Sequence
  Synthesized RNAi sequence
uauucuuugcuauaguagucgg

SEQ ID NO: 7648 - RNA, 22 nt, Artificial Sequence
  Synthesized RNAi sequence
uauugaguugauggcucaaacu

SEQ ID NO: 7649 - RNA, 22 nt, Artificial Sequence
  Synthesized RNAi sequence
uauuggucuuuuaaacuguagu

SEQ ID NO: 7650 - RNA, 22 nt, Artificial Sequence
  Synthesized RNAi sequence
uauuuacgcuguauaguugaaa

SEQ ID NO: 7651 - RNA, 22 nt, Artificial Sequence
  Synthesized RNAi sequence
uauuugguuuauacguggcuuu

SEQ ID NO: 7652 - RNA, 22 nt, Artificial Sequence
  Synthesized RNAi sequence
uauuuguuuucguaguuguuca

SEQ ID NO: 7653 - RNA, 22 nt, Artificial Sequence
  Synthesized RNAi sequence
uauuuuaguaacaucagcucca

SEQ ID NO: 7654 - RNA, 22 nt, Artificial Sequence
  Synthesized RNAi sequence
uauuuuguagcuuguuuaccac

SEQ ID NO: 7655 - RNA, 22 nt, Artificial Sequence
  Synthesized RNAi sequence
ucaaaagccucaacacguagag

SEQ ID NO: 7656 - RNA, 22 nt, Artificial Sequence
  Synthesized RNAi sequence
ucaaaagugauauucacacucu

SEQ ID NO: 7657 - RNA, 22 nt, Artificial Sequence
  Synthesized RNAi sequence
ucaaacauuuuaacugcaacuu

SEQ ID NO: 7658 - RNA, 22 nt, Artificial Sequence
  Synthesized RNAi sequence
ucaaaccuaauacucuagauaa

SEQ ID NO: 7659 - RNA, 22 nt, Artificial Sequence
  Synthesized RNAi sequence
ucaaacgaauuugauguuucaa

SEQ ID NO: 7660 - RNA, 22 nt, Artificial Sequence
  Synthesized RNAi sequence
ucaaagaaagaagugucuuaag

SEQ ID NO: 7661 - RNA, 22 nt, Artificial Sequence
  Synthesized RNAi sequence
ucaaagcuuucgcuagcauuuc

SEQ ID NO: 7662 - RNA, 22 nt, Artificial Sequence
  Synthesized RNAi sequence
ucaaaguaaagauggauggaac

SEQ ID NO: 7663 - RNA, 22 nt, Artificial Sequence
  Synthesized RNAi sequence
ucaaauaaguaguauguagcca

SEQ ID NO: 7664 - RNA, 22 nt, Artificial Sequence
  Synthesized RNAi sequence
ucaaauaauuaaaugaagccuc

SEQ ID NO: 7665 - RNA, 22 nt, Artificial Sequence
  Synthesized RNAi sequence
ucaaauagccuucucuguaacc

SEQ ID NO: 7666 - RNA, 22 nt, Artificial Sequence
  Synthesized RNAi sequence
ucaacaaacccuugccgagcug

SEQ ID NO: 7667 - RNA, 22 nt, Artificial Sequence
  Synthesized RNAi sequence
ucaacaacaucuuuaguuucua

SEQ ID NO: 7668 - RNA, 22 nt, Artificial Sequence
  Synthesized RNAi sequence
ucaacacaagcuuugauuuucu

SEQ ID NO: 7669 - RNA, 22 nt, Artificial Sequence
  Synthesized RNAi sequence
ucaacacguagagugucaucau

SEQ ID NO: 7670 - RNA, 22 nt, Artificial Sequence
  Synthesized RNAi sequence
ucaaccacacccucuuguauuu

SEQ ID NO: 7671 - RNA, 22 nt, Artificial Sequence
  Synthesized RNAi sequence
ucaacgauguaagaagacuggu

SEQ ID NO: 7672 - RNA, 22 nt, Artificial Sequence
  Synthesized RNAi sequence
ucaacucuauuuguuggagugu

SEQ ID NO: 7673 - RNA, 22 nt, Artificial Sequence
  Synthesized RNAi sequence
ucaacugaagguuuacuuucag

SEQ ID NO: 7674 - RNA, 22 nt, Artificial Sequence
  Synthesized RNAi sequence
ucaacugguuuugugcuccaaa

SEQ ID NO: 7675 - RNA, 22 nt, Artificial Sequence
  Synthesized RNAi sequence
ucaacuguauaggcagagcacu

SEQ ID NO: 7676 - RNA, 22 nt, Artificial Sequence
  Synthesized RNAi sequence
ucaacuugcauggcauuguuag

SEQ ID NO: 7677 - RNA, 22 nt, Artificial Sequence
  Synthesized RNAi sequence
ucaagaacgucuuucuguaugg

SEQ ID NO: 7678 - RNA, 22 nt, Artificial Sequence
  Synthesized RNAi sequence
ucaaguucaaaagugauauuca

SEQ ID NO: 7679 - RNA, 22 nt, Artificial Sequence
  Synthesized RNAi sequence
ucaauaaaauguucuucaggug

SEQ ID NO: 7680 - RNA, 22 nt, Artificial Sequence
  Synthesized RNAi sequence
ucaauacaagcaccaaggucac

SEQ ID NO: 7681 - RNA, 22 nt, Artificial Sequence
  Synthesized RNAi sequence
ucaauagucugaacaacuggug

SEQ ID NO: 7682 - RNA, 22 nt, Artificial Sequence
  Synthesized RNAi sequence
ucaauccuuucaucaaguucaa

SEQ ID NO: 7683 - RNA, 22 nt, Artificial Sequence
  Synthesized RNAi sequence
ucaaugcccagugguguaagua

SEQ ID NO: 7684 - RNA, 22 nt, Artificial Sequence
  Synthesized RNAi sequence
ucaaugucacuaacaagagugg

SEQ ID NO: 7685 - RNA, 22 nt, Artificial Sequence
  Synthesized RNAi sequence
ucaauuucuguacaaacaacac

SEQ ID NO: 7686 - RNA, 22 nt, Artificial Sequence
  Synthesized RNAi sequence
ucacaaucaccuucuucuucau

SEQ ID NO: 7687 - RNA, 22 nt, Artificial Sequence
  Synthesized RNAi sequence
ucacacucuuguaaccuugcac

SEQ ID NO: 7688 - RNA, 22 nt, Artificial Sequence
  Synthesized RNAi sequence
ucacagugucaucaccaaaagu

SEQ ID NO: 7689 - RNA, 22 nt, Artificial Sequence
  Synthesized RNAi sequence
ucacauacaaacuuaaaauuau

SEQ ID NO: 7690 - RNA, 22 nt, Artificial Sequence
  Synthesized RNAi sequence
ucacauuacacucaagaacguc

SEQ ID NO: 7691 - RNA, 22 nt, Artificial Sequence
  Synthesized RNAi sequence
ucaccaacaucagacacuaaug

SEQ ID NO: 7692 - RNA, 22 nt, Artificial Sequence
  Synthesized RNAi sequence
ucaccagacucaucaaauaagu

SEQ ID NO: 7693 - RNA, 22 nt, Artificial Sequence
  Synthesized RNAi sequence
ucaccagcccuugcucuguaau

SEQ ID NO: 7694 - RNA, 22 nt, Artificial Sequence
  Synthesized RNAi sequence
ucaccaucuagguggaaugugg

SEQ ID NO: 7695 - RNA, 22 nt, Artificial Sequence
  Synthesized RNAi sequence
ucacccacuauauauggagcau

SEQ ID NO: 7696 - RNA, 22 nt, Artificial Sequence
  Synthesized RNAi sequence
ucaccuaacucaccuacugucu

SEQ ID NO: 7697 - RNA, 22 nt, Artificial Sequence
  Synthesized RNAi sequence
ucaccuacugucuuauuacagu

SEQ ID NO: 7698 - RNA, 22 nt, Artificial Sequence
  Synthesized RNAi sequence
ucaccucucuuaagaaauucua

SEQ ID NO: 7699 - RNA, 22 nt, Artificial Sequence
  Synthesized RNAi sequence
ucaccuuuguuaacauuugggc

SEQ ID NO: 7700 - RNA, 22 nt, Artificial Sequence
  Synthesized RNAi sequence
ucacggggugucauguuuucaa

SEQ ID NO: 7701 - RNA, 22 nt, Artificial Sequence
  Synthesized RNAi sequence
ucacuaacaagaguggcagaau

SEQ ID NO: 7702 - RNA, 22 nt, Artificial Sequence
  Synthesized RNAi sequence
ucacuaauaaauguacuaccag

SEQ ID NO: 7703 - RNA, 22 nt, Artificial Sequence
  Synthesized RNAi sequence
ucacuagcacaaguaaauguac

SEQ ID NO: 7704 - RNA, 22 nt, Artificial Sequence
  Synthesized RNAi sequence
ucacugccgucuuguugaccaa

SEQ ID NO: 7705 - RNA, 22 nt, Artificial Sequence
  Synthesized RNAi sequence
ucacuguaacacuaucaacgau

SEQ ID NO: 7706 - RNA, 22 nt, Artificial Sequence
  Synthesized RNAi sequence
ucagacacuaaugccugaucua

SEQ ID NO: 7707 - RNA, 22 nt, Artificial Sequence
  Synthesized RNAi sequence
ucagagacugguuuuagaucuu

SEQ ID NO: 7708 - RNA, 22 nt, Artificial Sequence
  Synthesized RNAi sequence
ucagauucaacuugcauggcau

SEQ ID NO: 7709 - RNA, 22 nt, Artificial Sequence
  Synthesized RNAi sequence
ucagauugaugugacaauuuaa

SEQ ID NO: 7710 - RNA, 22 nt, Artificial Sequence
  Synthesized RNAi sequence
ucagcgaucuuuuguucaacuu

SEQ ID NO: 7711 - RNA, 22 nt, Artificial Sequence
  Synthesized RNAi sequence
ucagcuccauccaaauaaguug

SEQ ID NO: 7712 - RNA, 22 nt, Artificial Sequence
  Synthesized RNAi sequence
ucaggugaagaaacagaaacug

SEQ ID NO: 7713 - RNA, 22 nt, Artificial Sequence
  Synthesized RNAi sequence
ucagguguuuuagaagaagaag

SEQ ID NO: 7714 - RNA, 22 nt, Artificial Sequence
  Synthesized RNAi sequence
ucagguugaagagcagcagaag

SEQ ID NO: 7715 - RNA, 22 nt, Artificial Sequence
  Synthesized RNAi sequence
ucagguugucuaaguuaacaaa

SEQ ID NO: 7716 - RNA, 22 nt, Artificial Sequence
  Synthesized RNAi sequence
ucaguaaguuuuaaauaaccac

SEQ ID NO: 7717 - RNA, 22 nt, Artificial Sequence
  Synthesized RNAi sequence
ucaguacaucaaacgaauuuga

SEQ ID NO: 7718 - RNA, 22 nt, Artificial Sequence
  Synthesized RNAi sequence
ucaguaccauacucauauugag

SEQ ID NO: 7719 - RNA, 22 nt, Artificial Sequence
  Synthesized RNAi sequence
ucaguaggauuuauuggucuuu

SEQ ID NO: 7720 - RNA, 22 nt, Artificial Sequence
  Synthesized RNAi sequence
ucaguuauaaauggcuuaacuu

SEQ ID NO: 7721 - RNA, 22 nt, Artificial Sequence
  Synthesized RNAi sequence
ucaguugugugguaguacucaa

SEQ ID NO: 7722 - RNA, 22 nt, Artificial Sequence
  Synthesized RNAi sequence
ucauaacaaaaggugacuccug

SEQ ID NO: 7723 - RNA, 22 nt, Artificial Sequence
  Synthesized RNAi sequence
ucauaagaaagugugcccaugu

SEQ ID NO: 7724 - RNA, 22 nt, Artificial Sequence
  Synthesized RNAi sequence
ucauaagcacucuuaagaaguu

SEQ ID NO: 7725 - RNA, 22 nt, Artificial Sequence
  Synthesized RNAi sequence
ucauaagucuuuugaccagcuu

SEQ ID NO: 7726 - RNA, 22 nt, Artificial Sequence
  Synthesized RNAi sequence
ucauacaaguugaugaauuaca

SEQ ID NO: 7727 - RNA, 22 nt, Artificial Sequence
  Synthesized RNAi sequence
ucauauaccgagcagcuucuuc

SEQ ID NO: 7728 - RNA, 22 nt, Artificial Sequence
  Synthesized RNAi sequence
ucaucaaauaaguaguauguag

SEQ ID NO: 7729 - RNA, 22 nt, Artificial Sequence
  Synthesized RNAi sequence
ucaucaaguucaaaagugauau

SEQ ID NO: 7730 - RNA, 22 nt, Artificial Sequence
  Synthesized RNAi sequence
ucaucacuaauaaauguacuac

SEQ ID NO: 7731 - RNA, 22 nt, Artificial Sequence
  Synthesized RNAi sequence
ucaucagauucaacuugcaugg

SEQ ID NO: 7732 - RNA, 22 nt, Artificial Sequence
  Synthesized RNAi sequence
ucaucagcaaauuugauauuau

SEQ ID NO: 7733 - RNA, 22 nt, Artificial Sequence
  Synthesized RNAi sequence
ucaucaucuaaccaaucuucuu

SEQ ID NO: 7734 - RNA, 22 nt, Artificial Sequence
  Synthesized RNAi sequence
ucaucauuagguaaaacauaaa

SEQ ID NO: 7735 - RNA, 22 nt, Artificial Sequence
  Synthesized RNAi sequence
ucauccucaucuggaggguaga

SEQ ID NO: 7736 - RNA, 22 nt, Artificial Sequence
  Synthesized RNAi sequence
ucaucuaaaucaaugcccagug

SEQ ID NO: 7737 - RNA, 22 nt, Artificial Sequence
  Synthesized RNAi sequence
ucaucuaaccaaucuucuucuu

SEQ ID NO: 7738 - RNA, 22 nt, Artificial Sequence
  Synthesized RNAi sequence
ucaucuggaggguagaaagaac

SEQ ID NO: 7739 - RNA, 22 nt, Artificial Sequence
  Synthesized RNAi sequence
ucaucuucaguaccauacucau

SEQ ID NO: 7740 - RNA, 22 nt, Artificial Sequence
  Synthesized RNAi sequence
ucaucuuguuuucucuguucaa

SEQ ID NO: 7741 - RNA, 22 nt, Artificial Sequence
  Synthesized RNAi sequence
ucaugugaauuaugagguuuua

SEQ ID NO: 7742 - RNA, 22 nt, Artificial Sequence
  Synthesized RNAi sequence
ucauuaaguacuuuaucaaucc

SEQ ID NO: 7743 - RNA, 22 nt, Artificial Sequence
  Synthesized RNAi sequence
ucauuagagauaauagauggua

SEQ ID NO: 7744 - RNA, 22 nt, Artificial Sequence
  Synthesized RNAi sequence
ucauuagguaaaacauaaaaug

SEQ ID NO: 7745 - RNA, 22 nt, Artificial Sequence
  Synthesized RNAi sequence
ucauuagguuucuuaauaguaa

SEQ ID NO: 7746 - RNA, 22 nt, Artificial Sequence
  Synthesized RNAi sequence
ucauugacauguccacaacuug

SEQ ID NO: 7747 - RNA, 22 nt, Artificial Sequence
  Synthesized RNAi sequence
ucauuguuucucuaacaucacc

SEQ ID NO: 7748 - RNA, 22 nt, Artificial Sequence
  Synthesized RNAi sequence
ucauuuacuucuguaccgaguu

SEQ ID NO: 7749 - RNA, 22 nt, Artificial Sequence
  Synthesized RNAi sequence
ucauuuagaucguuaagugugu

SEQ ID NO: 7750 - RNA, 22 nt, Artificial Sequence
  Synthesized RNAi sequence
uccaaagacaacguauacacca

SEQ ID NO: 7751 - RNA, 22 nt, Artificial Sequence
  Synthesized RNAi sequence
uccaaagguuuaccuugguaau

SEQ ID NO: 7752 - RNA, 22 nt, Artificial Sequence
  Synthesized RNAi sequence
uccaaauaaguuggaccaaacu

SEQ ID NO: 7753 - RNA, 22 nt, Artificial Sequence
  Synthesized RNAi sequence
uccaaauuuaagccauguguua

SEQ ID NO: 7754 - RNA, 22 nt, Artificial Sequence
  Synthesized RNAi sequence
uccaacuuagggucaauuucug

SEQ ID NO: 7755 - RNA, 22 nt, Artificial Sequence
  Synthesized RNAi sequence
uccaagaaacaguuccaagaau

SEQ ID NO: 7756 - RNA, 22 nt, Artificial Sequence
  Synthesized RNAi sequence
uccaagaauuucuugcuucuca

SEQ ID NO: 7757 - RNA, 22 nt, Artificial Sequence
  Synthesized RNAi sequence
uccaauuuauaaguaacugguu

SEQ ID NO: 7758 - RNA, 22 nt, Artificial Sequence
  Synthesized RNAi sequence
uccacaacuugcguguggaggu

SEQ ID NO: 7759 - RNA, 22 nt, Artificial Sequence
  Synthesized RNAi sequence
uccacaaguuuuacacaccacg

SEQ ID NO: 7760 - RNA, 22 nt, Artificial Sequence
  Synthesized RNAi sequence
uccacacagacaggcauuaauu

SEQ ID NO: 7761 - RNA, 22 nt, Artificial Sequence
  Synthesized RNAi sequence
uccacuacuucuucagagacug

SEQ ID NO: 7762 - RNA, 22 nt, Artificial Sequence
  Synthesized RNAi sequence
uccacucaucuaaaucaaugcc

SEQ ID NO: 7763 - RNA, 22 nt, Artificial Sequence
  Synthesized RNAi sequence
uccagaauaggaccaaucuuua

SEQ ID NO: 7764 - RNA, 22 nt, Artificial Sequence
  Synthesized RNAi sequence
uccagaguuguuguaacuucuu

SEQ ID NO: 7765 - RNA, 22 nt, Artificial Sequence
  Synthesized RNAi sequence
uccauacauaauaaaaugaugc

SEQ ID NO: 7766 - RNA, 22 nt, Artificial Sequence
  Synthesized RNAi sequence
uccauaugucauugacaugucc

SEQ ID NO: 7767 - RNA, 22 nt, Artificial Sequence
  Synthesized RNAi sequence
uccauccaaauaaguuggacca

SEQ ID NO: 7768 - RNA, 22 nt, Artificial Sequence
  Synthesized RNAi sequence
uccauguuuaagguaaacauug

SEQ ID NO: 7769 - RNA, 22 nt, Artificial Sequence
  Synthesized RNAi sequence
uccauuagcauagacauaaaag

SEQ ID NO: 7770 - RNA, 22 nt, Artificial Sequence
  Synthesized RNAi sequence
uccauuaguagcuauguaauca

SEQ ID NO: 7771 - RNA, 22 nt, Artificial Sequence
  Synthesized RNAi sequence
ucccaagggacacuauuaacag

SEQ ID NO: 7772 - RNA, 22 nt, Artificial Sequence
  Synthesized RNAi sequence
ucccauuuaaaagaugaaaugg

SEQ ID NO: 7773 - RNA, 22 nt, Artificial Sequence
  Synthesized RNAi sequence
uccgcacuaucaccaacaucag

SEQ ID NO: 7774 - RNA, 22 nt, Artificial Sequence
  Synthesized RNAi sequence
uccgcuuaaaacacaacuacca

SEQ ID NO: 7775 - RNA, 22 nt, Artificial Sequence
  Synthesized RNAi sequence
uccguaauaggaccuuuguauu

SEQ ID NO: 7776 - RNA, 22 nt, Artificial Sequence
  Synthesized RNAi sequence
uccucacugccgucuuguugac

SEQ ID NO: 7777 - RNA, 22 nt, Artificial Sequence
  Synthesized RNAi sequence
uccucaucuggaggguagaaag

SEQ ID NO: 7778 - RNA, 22 nt, Artificial Sequence
  Synthesized RNAi sequence
uccuccauguuuaagguaaaca

SEQ ID NO: 7779 - RNA, 22 nt, Artificial Sequence
  Synthesized RNAi sequence
uccucuacaguguaaccauuua

SEQ ID NO: 7780 - RNA, 22 nt, Artificial Sequence
  Synthesized RNAi sequence
uccucugacuucaguacaucaa

SEQ ID NO: 7781 - RNA, 22 nt, Artificial Sequence
  Synthesized RNAi sequence
uccucuuuaggaaucucagcga

SEQ ID NO: 7782 - RNA, 22 nt, Artificial Sequence
  Synthesized RNAi sequence
uccugcaacaccuccuccaugu

SEQ ID NO: 7783 - RNA, 22 nt, Artificial Sequence
  Synthesized RNAi sequence
uccuuucaucaaguucaaaagu

SEQ ID NO: 7784 - RNA, 22 nt, Artificial Sequence
  Synthesized RNAi sequence
uccuuucuuaaaagagggugug

SEQ ID NO: 7785 - RNA, 22 nt, Artificial Sequence
  Synthesized RNAi sequence
ucgaagcuugcguuuggauaug

SEQ ID NO: 7786 - RNA, 22 nt, Artificial Sequence
  Synthesized RNAi sequence
ucgacucuuguugcucuauuac

SEQ ID NO: 7787 - RNA, 22 nt, Artificial Sequence
  Synthesized RNAi sequence
ucgcaaauuccaagaaacaguu

SEQ ID NO: 7788 - RNA, 22 nt, Artificial Sequence
  Synthesized RNAi sequence
ucgcaacuucaucacuaauaaa

SEQ ID NO: 7789 - RNA, 22 nt, Artificial Sequence
  Synthesized RNAi sequence
ucgcaggcaagauuauccauuc

SEQ ID NO: 7790 - RNA, 22 nt, Artificial Sequence
  Synthesized RNAi sequence
ucgccaguaacuucuaugucag

SEQ ID NO: 7791 - RNA, 22 nt, Artificial Sequence
  Synthesized RNAi sequence
ucggcauagaugcuuuaauucu

SEQ ID NO: 7792 - RNA, 22 nt, Artificial Sequence
  Synthesized RNAi sequence
ucggggccauuuguacaagauu

SEQ ID NO: 7793 - RNA, 22 nt, Artificial Sequence
  Synthesized RNAi sequence
ucgguaguuuucacauuacacu

SEQ ID NO: 7794 - RNA, 22 nt, Artificial Sequence
  Synthesized RNAi sequence
ucguaguuguucagacaaugac

SEQ ID NO: 7795 - RNA, 22 nt, Artificial Sequence
  Synthesized RNAi sequence
ucgugcugauuaaaauuuucau

SEQ ID NO: 7796 - RNA, 22 nt, Artificial Sequence
  Synthesized RNAi sequence
ucguuaaguguguugauaagug

SEQ ID NO: 7797 - RNA, 22 nt, Artificial Sequence
  Synthesized RNAi sequence
ucuaaaccacuaagacaaacac

SEQ ID NO: 7798 - RNA, 22 nt, Artificial Sequence
  Synthesized RNAi sequence
ucuaaagaaggauaggugucua

SEQ ID NO: 7799 - RNA, 22 nt, Artificial Sequence
  Synthesized RNAi sequence
ucuaaagaaucuaaaccacuaa

SEQ ID NO: 7800 - RNA, 22 nt, Artificial Sequence
  Synthesized RNAi sequence
ucuaaauuggcauguugaaaca

SEQ ID NO: 7801 - RNA, 22 nt, Artificial Sequence
  Synthesized RNAi sequence
ucuaacaccauuaacaauaguu

SEQ ID NO: 7802 - RNA, 22 nt, Artificial Sequence
  Synthesized RNAi sequence
ucuaacaucaccuaacucaccu

SEQ ID NO: 7803 - RNA, 22 nt, Artificial Sequence
  Synthesized RNAi sequence
ucuaaccaaucuucuucuugcu

SEQ ID NO: 7804 - RNA, 22 nt, Artificial Sequence
  Synthesized RNAi sequence
ucuaaccauagcugaaaucggg

SEQ ID NO: 7805 - RNA, 22 nt, Artificial Sequence
  Synthesized RNAi sequence
ucuaaggacacauucuuugcaa

SEQ ID NO: 7806 - RNA, 22 nt, Artificial Sequence
  Synthesized RNAi sequence
ucuaaguuaacaaaaugagaga

SEQ ID NO: 7807 - RNA, 22 nt, Artificial Sequence
  Synthesized RNAi sequence
ucuacaacaugcacauaacuuu

SEQ ID NO: 7808 - RNA, 22 nt, Artificial Sequence
  Synthesized RNAi sequence
ucuacacaaacucuuaaagaau

SEQ ID NO: 7809 - RNA, 22 nt, Artificial Sequence
  Synthesized RNAi sequence
ucuacacccuuaaggguugucu

SEQ ID NO: 7810 - RNA, 22 nt, Artificial Sequence
  Synthesized RNAi sequence
ucuacaguguaaccauuuaaac

SEQ ID NO: 7811 - RNA, 22 nt, Artificial Sequence
  Synthesized RNAi sequence
ucuacauaagcagccauuagau

SEQ ID NO: 7812 - RNA, 22 nt, Artificial Sequence
  Synthesized RNAi sequence
ucuacaucugaaucaacaaacc

SEQ ID NO: 7813 - RNA, 22 nt, Artificial Sequence
  Synthesized RNAi sequence
ucuacuguuguaaacaccuuaa

SEQ ID NO: 7814 - RNA, 22 nt, Artificial Sequence
  Synthesized RNAi sequence
ucuagacaaaauuuaccgacac

SEQ ID NO: 7815 - RNA, 22 nt, Artificial Sequence
  Synthesized RNAi sequence
ucuagauaauucauuagguuuc

SEQ ID NO: 7816 - RNA, 22 nt, Artificial Sequence
  Synthesized RNAi sequence
ucuagcaccauaaucaaccaca

SEQ ID NO: 7817 - RNA, 22 nt, Artificial Sequence
  Synthesized RNAi sequence
ucuagguggaaugugguaggau

SEQ ID NO: 7818 - RNA, 22 nt, Artificial Sequence
  Synthesized RNAi sequence
ucuaguaacaguauagguugac

SEQ ID NO: 7819 - RNA, 22 nt, Artificial Sequence
  Synthesized RNAi sequence
ucuaguaguugcacaugucaac

SEQ ID NO: 7820 - RNA, 22 nt, Artificial Sequence
  Synthesized RNAi sequence
ucuauaccuaguuguguagauu

SEQ ID NO: 7821 - RNA, 22 nt, Artificial Sequence
  Synthesized RNAi sequence
ucuaucacagugucaucaccaa

SEQ ID NO: 7822 - RNA, 22 nt, Artificial Sequence
  Synthesized RNAi sequence
ucuaugcaauacaaaguuucuu

SEQ ID NO: 7823 - RNA, 22 nt, Artificial Sequence
  Synthesized RNAi sequence
ucuaugucagauugaugugaca

SEQ ID NO: 7824 - RNA, 22 nt, Artificial Sequence
  Synthesized RNAi sequence
ucuauuacguuuguaacacauc

SEQ ID NO: 7825 - RNA, 22 nt, Artificial Sequence
  Synthesized RNAi sequence
ucuauuuguuggaguguuaaca

SEQ ID NO: 7826 - RNA, 22 nt, Artificial Sequence
  Synthesized RNAi sequence
ucucaaagaaagaagugucuua

SEQ ID NO: 7827 - RNA, 22 nt, Artificial Sequence
  Synthesized RNAi sequence
ucucaaagcuuucgcuagcauu

SEQ ID NO: 7828 - RNA, 22 nt, Artificial Sequence
  Synthesized RNAi sequence
ucucagcgaucuuuuguucaac

SEQ ID NO: 7829 - RNA, 22 nt, Artificial Sequence
  Synthesized RNAi sequence
ucucagguugucuaaguuaaca

SEQ ID NO: 7830 - RNA, 22 nt, Artificial Sequence
  Synthesized RNAi sequence
ucucauauaccgagcagcuucu

SEQ ID NO: 7831 - RNA, 22 nt, Artificial Sequence
  Synthesized RNAi sequence
ucucauuagagauaauagaugg

SEQ ID NO: 7832 - RNA, 22 nt, Artificial Sequence
  Synthesized RNAi sequence
ucuccuacaacuucgguaguuu

SEQ ID NO: 7833 - RNA, 22 nt, Artificial Sequence
  Synthesized RNAi sequence
ucucgcaaauuccaagaaacag

SEQ ID NO: 7834 - RNA, 22 nt, Artificial Sequence
  Synthesized RNAi sequence
ucucgcaacuucaucacuaaua

SEQ ID NO: 7835 - RNA, 22 nt, Artificial Sequence
  Synthesized RNAi sequence
ucucuaacaucaccuaacucac

SEQ ID NO: 7836 - RNA, 22 nt, Artificial Sequence
  Synthesized RNAi sequence
ucucucaaagaaagaagugucu

SEQ ID NO: 7837 - RNA, 22 nt, Artificial Sequence
  Synthesized RNAi sequence
ucucucgcaacuucaucacuaa

SEQ ID NO: 7838 - RNA, 22 nt, Artificial Sequence
  Synthesized RNAi sequence
ucucuguaaccaguacaguaag

SEQ ID NO: 7839 - RNA, 22 nt, Artificial Sequence
  Synthesized RNAi sequence
ucucuguucaacugaagguuua

SEQ ID NO: 7840 - RNA, 22 nt, Artificial Sequence
  Synthesized RNAi sequence
ucucuugaagcagguuucuuau

SEQ ID NO: 7841 - RNA, 22 nt, Artificial Sequence
  Synthesized RNAi sequence
ucugaacaacugguguaaguuc

SEQ ID NO: 7842 - RNA, 22 nt, Artificial Sequence
  Synthesized RNAi sequence
ucugaacaccuuucuuaaauug

SEQ ID NO: 7843 - RNA, 22 nt, Artificial Sequence
  Synthesized RNAi sequence
ucugaaucaacaaacccuugcc

SEQ ID NO: 7844 - RNA, 22 nt, Artificial Sequence
  Synthesized RNAi sequence
ucugacuucaguacaucaaacg

SEQ ID NO: 7845 - RNA, 22 nt, Artificial Sequence
  Synthesized RNAi sequence
ucugaggacuuuguaaguaaag

SEQ ID NO: 7846 - RNA, 22 nt, Artificial Sequence
  Synthesized RNAi sequence
ucugauuguccucacugccguc

SEQ ID NO: 7847 - RNA, 22 nt, Artificial Sequence
  Synthesized RNAi sequence
ucugcaugugcaagcauuucuc

SEQ ID NO: 7848 - RNA, 22 nt, Artificial Sequence
  Synthesized RNAi sequence
ucugcccauuuaauagaaguua

SEQ ID NO: 7849 - RNA, 22 nt, Artificial Sequence
  Synthesized RNAi sequence
ucuggaugaagauugccauuaa

SEQ ID NO: 7850 - RNA, 22 nt, Artificial Sequence
  Synthesized RNAi sequence
ucuguaauaagcaucuuguaga

SEQ ID NO: 7851 - RNA, 22 nt, Artificial Sequence
  Synthesized RNAi sequence
ucuguacaaacaacaccaucca

SEQ ID NO: 7852 - RNA, 22 nt, Artificial Sequence
  Synthesized RNAi sequence
ucuguaccgaguucaacuguau

SEQ ID NO: 7853 - RNA, 22 nt, Artificial Sequence
  Synthesized RNAi sequence
ucuguaugguaggauuuuccac

SEQ ID NO: 7854 - RNA, 22 nt, Artificial Sequence
  Synthesized RNAi sequence
ucugugaggaacuuaguuucuu

SEQ ID NO: 7855 - RNA, 22 nt, Artificial Sequence
  Synthesized RNAi sequence
ucuguucaacugaagguuuacu

SEQ ID NO: 7856 - RNA, 22 nt, Artificial Sequence
  Synthesized RNAi sequence
ucuguuggcacuuuucucaaag

SEQ ID NO: 7857 - RNA, 22 nt, Artificial Sequence
  Synthesized RNAi sequence
ucuuaaaagaggguguguagug

SEQ ID NO: 7858 - RNA, 22 nt, Artificial Sequence
  Synthesized RNAi sequence
ucuuaaauuguucauaagaaag

SEQ ID NO: 7859 - RNA, 22 nt, Artificial Sequence
  Synthesized RNAi sequence
ucuuaacaguauucuuugcuau

SEQ ID NO: 7860 - RNA, 22 nt, Artificial Sequence
  Synthesized RNAi sequence
ucuuaagaaguugaaugucuuc

SEQ ID NO: 7861 - RNA, 22 nt, Artificial Sequence
  Synthesized RNAi sequence
ucuuaagauugucaaaggugau

SEQ ID NO: 7862 - RNA, 22 nt, Artificial Sequence
  Synthesized RNAi sequence
ucuuaauaguaagacuagaauu

SEQ ID NO: 7863 - RNA, 22 nt, Artificial Sequence
  Synthesized RNAi sequence
ucuuauaaccaguuaacugguu

SEQ ID NO: 7864 - RNA, 22 nt, Artificial Sequence
  Synthesized RNAi sequence
ucuuaucaucuuguuuucucug

SEQ ID NO: 7865 - RNA, 22 nt, Artificial Sequence
  Synthesized RNAi sequence
ucuuauuacaguaggcuaagau

SEQ ID NO: 7866 - RNA, 22 nt, Artificial Sequence
  Synthesized RNAi sequence
ucuucaacacaagcuuugauuu

SEQ ID NO: 7867 - RNA, 22 nt, Artificial Sequence
  Synthesized RNAi sequence
ucuucaccuuuguuaacauuug

SEQ ID NO: 7868 - RNA, 22 nt, Artificial Sequence
  Synthesized RNAi sequence
ucuucacuguaacacuaucaac

SEQ ID NO: 7869 - RNA, 22 nt, Artificial Sequence
  Synthesized RNAi sequence
ucuucagagacugguuuuagau

SEQ ID NO: 7870 - RNA, 22 nt, Artificial Sequence
  Synthesized RNAi sequence
ucuucagguguuuuagaagaag

SEQ ID NO: 7871 - RNA, 22 nt, Artificial Sequence
  Synthesized RNAi sequence
ucuucaguaccauacucauauu

SEQ ID NO: 7872 - RNA, 22 nt, Artificial Sequence
  Synthesized RNAi sequence
ucuucauccucaucuggagggu

SEQ ID NO: 7873 - RNA, 22 nt, Artificial Sequence
  Synthesized RNAi sequence
ucuuccaaauuuaagccaugug

SEQ ID NO: 7874 - RNA, 22 nt, Artificial Sequence
  Synthesized RNAi sequence
ucuuccagaguuguuguaacuu

SEQ ID NO: 7875 - RNA, 22 nt, Artificial Sequence
  Synthesized RNAi sequence
ucuucgcaggcaagauuaucca

SEQ ID NO: 7876 - RNA, 22 nt, Artificial Sequence
  Synthesized RNAi sequence
ucuucuucagguugaagagcag

SEQ ID NO: 7877 - RNA, 22 nt, Artificial Sequence
  Synthesized RNAi sequence
ucuucuucuucacaaucaccuu

SEQ ID NO: 7878 - RNA, 22 nt, Artificial Sequence
  Synthesized RNAi sequence
ucuugaacaacaucacccacua

SEQ ID NO: 7879 - RNA, 22 nt, Artificial Sequence
  Synthesized RNAi sequence
ucuugaagcagguuucuuauaa

SEQ ID NO: 7880 - RNA, 22 nt, Artificial Sequence
  Synthesized RNAi sequence
ucuugcuucucauuagagauaa

SEQ ID NO: 7881 - RNA, 22 nt, Artificial Sequence
  Synthesized RNAi sequence
ucuuguaaccuugcacuucuau

SEQ ID NO: 7882 - RNA, 22 nt, Artificial Sequence
  Synthesized RNAi sequence
ucuuguagagcagguggauuaa

SEQ ID NO: 7883 - RNA, 22 nt, Artificial Sequence
  Synthesized RNAi sequence
ucuuguauuuuaauacccuuau

SEQ ID NO: 7884 - RNA, 22 nt, Artificial Sequence
  Synthesized RNAi sequence
ucuuguugaccaacaguuuguu

SEQ ID NO: 7885 - RNA, 22 nt, Artificial Sequence
  Synthesized RNAi sequence
ucuuguugcucuauuacguuug

SEQ ID NO: 7886 - RNA, 22 nt, Artificial Sequence
  Synthesized RNAi sequence
ucuuguuuucucuguucaacug

SEQ ID NO: 7887 - RNA, 22 nt, Artificial Sequence
  Synthesized RNAi sequence
ucuuuaacguuccauaucaaag

SEQ ID NO: 7888 - RNA, 22 nt, Artificial Sequence
  Synthesized RNAi sequence
ucuuuagaaguuauauguuuau

SEQ ID NO: 7889 - RNA, 22 nt, Artificial Sequence
  Synthesized RNAi sequence
ucuuuaggaaucucagcgaucu

SEQ ID NO: 7890 - RNA, 22 nt, Artificial Sequence
  Synthesized RNAi sequence
ucuuuaguuucuacaucugaau

SEQ ID NO: 7891 - RNA, 22 nt, Artificial Sequence
  Synthesized RNAi sequence
ucuuuauaggaaccagcaagug

SEQ ID NO: 7892 - RNA, 22 nt, Artificial Sequence
  Synthesized RNAi sequence
ucuuucauaagucuuuugacca

SEQ ID NO: 7893 - RNA, 22 nt, Artificial Sequence
  Synthesized RNAi sequence
ucuuucuuauaauaauugucca

SEQ ID NO: 7894 - RNA, 22 nt, Artificial Sequence
  Synthesized RNAi sequence
ucuuucuuuaagaaagugaugu

SEQ ID NO: 7895 - RNA, 22 nt, Artificial Sequence
  Synthesized RNAi sequence
ucuuugcuauaguagucggcau

SEQ ID NO: 7896 - RNA, 22 nt, Artificial Sequence
  Synthesized RNAi sequence
ucuuuguagaaaacauccguaa

SEQ ID NO: 7897 - RNA, 22 nt, Artificial Sequence
  Synthesized RNAi sequence
ucuuuguuguuacaacauuaac

SEQ ID NO: 7898 - RNA, 22 nt, Artificial Sequence
  Synthesized RNAi sequence
ucuuuuaaacuguagugacaag

SEQ ID NO: 7899 - RNA, 22 nt, Artificial Sequence
  Synthesized RNAi sequence
ucuuuugaccagcuuuaucaaa

SEQ ID NO: 7900 - RNA, 22 nt, Artificial Sequence
  Synthesized RNAi sequence
ucuuuugcaagaaucuaaauug

SEQ ID NO: 7901 - RNA, 22 nt, Artificial Sequence
  Synthesized RNAi sequence
ugaaaacguauuaacguaagca

SEQ ID NO: 7902 - RNA, 22 nt, Artificial Sequence
  Synthesized RNAi sequence
ugaaacaaguaacucauuguuu

SEQ ID NO: 7903 - RNA, 22 nt, Artificial Sequence
  Synthesized RNAi sequence
ugaaauaaaaguagauaagaca

SEQ ID NO: 7904 - RNA, 22 nt, Artificial Sequence
  Synthesized RNAi sequence
ugaaauaagaauugucuuucuu

SEQ ID NO: 7905 - RNA, 22 nt, Artificial Sequence
  Synthesized RNAi sequence
ugaaaucggggccauuuguaca

SEQ ID NO: 7906 - RNA, 22 nt, Artificial Sequence
  Synthesized RNAi sequence
ugaaaucuuuaacguuccauau

SEQ ID NO: 7907 - RNA, 22 nt, Artificial Sequence
  Synthesized RNAi sequence
ugaaaugguaauuuguauaguu

SEQ ID NO: 7908 - RNA, 22 nt, Artificial Sequence
  Synthesized RNAi sequence
ugaacaacaucacccacuauau

SEQ ID NO: 7909 - RNA, 22 nt, Artificial Sequence
  Synthesized RNAi sequence
ugaacaacugguguaaguucca

SEQ ID NO: 7910 - RNA, 22 nt, Artificial Sequence
  Synthesized RNAi sequence
ugaacaccuuucuuaaauuguu

SEQ ID NO: 7911 - RNA, 22 nt, Artificial Sequence
  Synthesized RNAi sequence
ugaaccuuuaguguuauuagcu

SEQ ID NO: 7912 - RNA, 22 nt, Artificial Sequence
  Synthesized RNAi sequence
ugaagaaacagaaacuguagcu

SEQ ID NO: 7913 - RNA, 22 nt, Artificial Sequence
  Synthesized RNAi sequence
ugaagagcagcagaaguggcac

SEQ ID NO: 7914 - RNA, 22 nt, Artificial Sequence
  Synthesized RNAi sequence
ugaagauugccauuaaugucaa

SEQ ID NO: 7915 - RNA, 22 nt, Artificial Sequence
  Synthesized RNAi sequence
ugaagcagguuucuuauaacca

SEQ ID NO: 7916 - RNA, 22 nt, Artificial Sequence
  Synthesized RNAi sequence
ugaagccucuagacaaaauuua

SEQ ID NO: 7917 - RNA, 22 nt, Artificial Sequence
  Synthesized RNAi sequence
ugaagguuuacuuucaguuaua

SEQ ID NO: 7918 - RNA, 22 nt, Artificial Sequence
  Synthesized RNAi sequence
ugaaucaacaaacccuugccga

SEQ ID NO: 7919 - RNA, 22 nt, Artificial Sequence
  Synthesized RNAi sequence
ugaaugucuucaccuuuguuaa

SEQ ID NO: 7920 - RNA, 22 nt, Artificial Sequence
  Synthesized RNAi sequence
ugaauuacaaccgucuacaaca

SEQ ID NO: 7921 - RNA, 22 nt, Artificial Sequence
  Synthesized RNAi sequence
ugacaagucucucgcaacuuca

SEQ ID NO: 7922 - RNA, 22 nt, Artificial Sequence
  Synthesized RNAi sequence
ugacaauuuaagacauucaaca

SEQ ID NO: 7923 - RNA, 22 nt, Artificial Sequence
  Synthesized RNAi sequence
ugacacauaagcugacuguagu

SEQ ID NO: 7924 - RNA, 22 nt, Artificial Sequence
  Synthesized RNAi sequence
ugacaucauaacaaaaggugac

SEQ ID NO: 7925 - RNA, 22 nt, Artificial Sequence
  Synthesized RNAi sequence
ugacaugaaaucuuuaacguuc

SEQ ID NO: 7926 - RNA, 22 nt, Artificial Sequence
  Synthesized RNAi sequence
ugacauguaccuacccagaaaa

SEQ ID NO: 7927 - RNA, 22 nt, Artificial Sequence
  Synthesized RNAi sequence
ugacauguccacaacuugcgug

SEQ ID NO: 7928 - RNA, 22 nt, Artificial Sequence
  Synthesized RNAi sequence
ugacauuaguagaguucaaaua

SEQ ID NO: 7929 - RNA, 22 nt, Artificial Sequence
  Synthesized RNAi sequence
ugaccaacaguuuguugacuau

SEQ ID NO: 7930 - RNA, 22 nt, Artificial Sequence
  Synthesized RNAi sequence
ugaccagcuuuaucaaaguaaa

SEQ ID NO: 7931 - RNA, 22 nt, Artificial Sequence
  Synthesized RNAi sequence
ugacccggguaagugguuauau

SEQ ID NO: 7932 - RNA, 22 nt, Artificial Sequence
  Synthesized RNAi sequence
ugacgcgcacuacagucaauac

SEQ ID NO: 7933 - RNA, 22 nt, Artificial Sequence
  Synthesized RNAi sequence
ugacuccuguuguacuagauau

SEQ ID NO: 7934 - RNA, 22 nt, Artificial Sequence
  Synthesized RNAi sequence
ugacuguaguaaacagacgcug

SEQ ID NO: 7935 - RNA, 22 nt, Artificial Sequence
  Synthesized RNAi sequence
ugacuucaguacaucaaacgaa

SEQ ID NO: 7936 - RNA, 22 nt, Artificial Sequence
  Synthesized RNAi sequence
ugagagaucucauauaccgagc

SEQ ID NO: 7937 - RNA, 22 nt, Artificial Sequence
  Synthesized RNAi sequence
ugagaugguuucaauaaaaugu

SEQ ID NO: 7938 - RNA, 22 nt, Artificial Sequence
  Synthesized RNAi sequence
ugagcagguggugcugacauca

SEQ ID NO: 7939 - RNA, 22 nt, Artificial Sequence
  Synthesized RNAi sequence
ugagcauauaguuauuacaacu

SEQ ID NO: 7940 - RNA, 22 nt, Artificial Sequence
  Synthesized RNAi sequence
ugaggaacuuaguuucuuccag

SEQ ID NO: 7941 - RNA, 22 nt, Artificial Sequence
  Synthesized RNAi sequence
ugaggacuuuguaaguaaagca

SEQ ID NO: 7942 - RNA, 22 nt, Artificial Sequence
  Synthesized RNAi sequence
ugagguuuuauuuuaguaacau

SEQ ID NO: 7943 - RNA, 22 nt, Artificial Sequence
  Synthesized RNAi sequence
ugaguagauuaaagaaccuagg

SEQ ID NO: 7944 - RNA, 22 nt, Artificial Sequence
  Synthesized RNAi sequence
ugaguagcaaggguuuucaaac

SEQ ID NO: 7945 - RNA, 22 nt, Artificial Sequence
  Synthesized RNAi sequence
ugaguugauggcucaaacucuu

SEQ ID NO: 7946 - RNA, 22 nt, Artificial Sequence
  Synthesized RNAi sequence
ugauaacuucaccaucuaggug

SEQ ID NO: 7947 - RNA, 22 nt, Artificial Sequence
  Synthesized RNAi sequence
ugauaagugacgcuacaguugu

SEQ ID NO: 7948 - RNA, 22 nt, Artificial Sequence
  Synthesized RNAi sequence
ugauauuaucacauacaaacuu

SEQ ID NO: 7949 - RNA, 22 nt, Artificial Sequence
  Synthesized RNAi sequence
ugauauucacacucuuguaacc

SEQ ID NO: 7950 - RNA, 22 nt, Artificial Sequence
  Synthesized RNAi sequence
ugaucuaguaacaguauagguu

SEQ ID NO: 7951 - RNA, 22 nt, Artificial Sequence
  Synthesized RNAi sequence
ugaugaaaacguauuaacguaa

SEQ ID NO: 7952 - RNA, 22 nt, Artificial Sequence
  Synthesized RNAi sequence
ugaugaauuacaaccgucuaca

SEQ ID NO: 7953 - RNA, 22 nt, Artificial Sequence
  Synthesized RNAi sequence
ugaugcaaagaagauguacauu

SEQ ID NO: 7954 - RNA, 22 nt, Artificial Sequence
  Synthesized RNAi sequence
ugauggcucaaacucuucuucu

SEQ ID NO: 7955 - RNA, 22 nt, Artificial Sequence
  Synthesized RNAi sequence
ugaugucaaugucacuaacaag

SEQ ID NO: 7956 - RNA, 22 nt, Artificial Sequence
  Synthesized RNAi sequence
ugaugugacaauuuaagacauu

SEQ ID NO: 7957 - RNA, 22 nt, Artificial Sequence
  Synthesized RNAi sequence
ugauguuucaacugguuuugug

SEQ ID NO: 7958 - RNA, 22 nt, Artificial Sequence
  Synthesized RNAi sequence
ugauuaaaauuuucauaagcac

SEQ ID NO: 7959 - RNA, 22 nt, Artificial Sequence
  Synthesized RNAi sequence
ugauuguccucacugccgucuu

SEQ ID NO: 7960 - RNA, 22 nt, Artificial Sequence
  Synthesized RNAi sequence
ugauuuugcagaugauucuuca

SEQ ID NO: 7961 - RNA, 22 nt, Artificial Sequence
  Synthesized RNAi sequence
ugcaaagaagauguacauucua

SEQ ID NO: 7962 - RNA, 22 nt, Artificial Sequence
  Synthesized RNAi sequence
ugcaacuuccgcacuaucacca

SEQ ID NO: 7963 - RNA, 22 nt, Artificial Sequence
  Synthesized RNAi sequence
ugcaagaaucuaaauuggcaug

SEQ ID NO: 7964 - RNA, 22 nt, Artificial Sequence
  Synthesized RNAi sequence
ugcaagcauuucucgcaaauuc

SEQ ID NO: 7965 - RNA, 22 nt, Artificial Sequence
  Synthesized RNAi sequence
ugcaaguagaacuucgugcuga

SEQ ID NO: 7966 - RNA, 22 nt, Artificial Sequence
  Synthesized RNAi sequence
ugcaauacaaaguuucuuuaga

SEQ ID NO: 7967 - RNA, 22 nt, Artificial Sequence
  Synthesized RNAi sequence
ugcaauagugacauuaguagag

SEQ ID NO: 7968 - RNA, 22 nt, Artificial Sequence
  Synthesized RNAi sequence
ugcacaaaaguuagcagcuuca

SEQ ID NO: 7969 - RNA, 22 nt, Artificial Sequence
  Synthesized RNAi sequence
ugcacauaacuuuuccauacau

SEQ ID NO: 7970 - RNA, 22 nt, Artificial Sequence
  Synthesized RNAi sequence
ugcacuucuaucacagugucau

SEQ ID NO: 7971 - RNA, 22 nt, Artificial Sequence
  Synthesized RNAi sequence
ugcaguggcaagauaacaguug

SEQ ID NO: 7972 - RNA, 22 nt, Artificial Sequence
  Synthesized RNAi sequence
ugcauggcauuguuaguagccu

SEQ ID NO: 7973 - RNA, 22 nt, Artificial Sequence
  Synthesized RNAi sequence
ugcaugugcaagcauuucucgc

SEQ ID NO: 7974 - RNA, 22 nt, Artificial Sequence
  Synthesized RNAi sequence
ugcauuguuaacaugccaaaca

SEQ ID NO: 7975 - RNA, 22 nt, Artificial Sequence
  Synthesized RNAi sequence
ugccaaacaauagguuuaugua

SEQ ID NO: 7976 - RNA, 22 nt, Artificial Sequence
  Synthesized RNAi sequence
ugccacaacacaggcgaacuca

SEQ ID NO: 7977 - RNA, 22 nt, Artificial Sequence
  Synthesized RNAi sequence
ugccauuaaugucaauauaaag

SEQ ID NO: 7978 - RNA, 22 nt, Artificial Sequence
  Synthesized RNAi sequence
ugcccagugguguaaguaauuc

SEQ ID NO: 7979 - RNA, 22 nt, Artificial Sequence
  Synthesized RNAi sequence
ugcccauguacauaacagcuuc

SEQ ID NO: 7980 - RNA, 22 nt, Artificial Sequence
  Synthesized RNAi sequence
ugcccauuuaauagaaguuaaa

SEQ ID NO: 7981 - RNA, 22 nt, Artificial Sequence
  Synthesized RNAi sequence
ugccgagcugcugaaauaaaag

SEQ ID NO: 7982 - RNA, 22 nt, Artificial Sequence
  Synthesized RNAi sequence
ugccgucuuguugaccaacagu

SEQ ID NO: 7983 - RNA, 22 nt, Artificial Sequence
  Synthesized RNAi sequence
ugccuaaauuagacauuaaaac

SEQ ID NO: 7984 - RNA, 22 nt, Artificial Sequence
  Synthesized RNAi sequence
ugccuccucuacaguguaacca

SEQ ID NO: 7985 - RNA, 22 nt, Artificial Sequence
  Synthesized RNAi sequence
ugcgaacaguaucuacacaaac

SEQ ID NO: 7986 - RNA, 22 nt, Artificial Sequence
  Synthesized RNAi sequence
ugcgcguccucugacuucagua

SEQ ID NO: 7987 - RNA, 22 nt, Artificial Sequence
  Synthesized RNAi sequence
ugcguguggagguuaauguugu

SEQ ID NO: 7988 - RNA, 22 nt, Artificial Sequence
  Synthesized RNAi sequence
ugcguguuucuucugcaugugc

SEQ ID NO: 7989 - RNA, 22 nt, Artificial Sequence
  Synthesized RNAi sequence
ugcguuuggauaugguugguuu

SEQ ID NO: 7990 - RNA, 22 nt, Artificial Sequence
  Synthesized RNAi sequence
ugcuauaguagucggcauagau

SEQ ID NO: 7991 - RNA, 22 nt, Artificial Sequence
  Synthesized RNAi sequence
ugcuaucuuuguuguuacaaca

SEQ ID NO: 7992 - RNA, 22 nt, Artificial Sequence
  Synthesized RNAi sequence
ugcuccaaagacaacguauaca

SEQ ID NO: 7993 - RNA, 22 nt, Artificial Sequence
  Synthesized RNAi sequence
ugcucuauuacguuuguaacac

SEQ ID NO: 7994 - RNA, 22 nt, Artificial Sequence
  Synthesized RNAi sequence
ugcucuguaauaagcaucuugu

SEQ ID NO: 7995 - RNA, 22 nt, Artificial Sequence
  Synthesized RNAi sequence
ugcugaaauaaaaguagauaag

SEQ ID NO: 7996 - RNA, 22 nt, Artificial Sequence
  Synthesized RNAi sequence
ugcugacaucauaacaaaaggu

SEQ ID NO: 7997 - RNA, 22 nt, Artificial Sequence
  Synthesized RNAi sequence
ugcugacauguaccuacccaga

SEQ ID NO: 7998 - RNA, 22 nt, Artificial Sequence
  Synthesized RNAi sequence
ugcugauuaaaauuuucauaag

SEQ ID NO: 7999 - RNA, 22 nt, Artificial Sequence
  Synthesized RNAi sequence
ugcugguuuaaguauaaugucu

SEQ ID NO: 8000 - RNA, 22 nt, Artificial Sequence
  Synthesized RNAi sequence
ugcuguuguccacaaguuuuac

SEQ ID NO: 8001 - RNA, 22 nt, Artificial Sequence
  Synthesized RNAi sequence
ugcuuaaguucauacugagcag

SEQ ID NO: 8002 - RNA, 22 nt, Artificial Sequence
  Synthesized RNAi sequence
ugcuucaaccaauuauuaacaa

SEQ ID NO: 8003 - RNA, 22 nt, Artificial Sequence
  Synthesized RNAi sequence
ugcuucucauuagagauaauag

SEQ ID NO: 8004 - RNA, 22 nt, Artificial Sequence
  Synthesized RNAi sequence
ugcuuuaauucuagaauuugua

SEQ ID NO: 8005 - RNA, 22 nt, Artificial Sequence
  Synthesized RNAi sequence
uggaaccauucuucacuguaac

SEQ ID NO: 8006 - RNA, 22 nt, Artificial Sequence
  Synthesized RNAi sequence
uggaaugugguaggauuacuag

SEQ ID NO: 8007 - RNA, 22 nt, Artificial Sequence
  Synthesized RNAi sequence
uggaccaaacuguuguccauau

SEQ ID NO: 8008 - RNA, 22 nt, Artificial Sequence
  Synthesized RNAi sequence
uggagcaucuuucuuuaagaaa

SEQ ID NO: 8009 - RNA, 22 nt, Artificial Sequence
  Synthesized RNAi sequence
uggaggguagaaagaacaauac

SEQ ID NO: 8010 - RNA, 22 nt, Artificial Sequence
  Synthesized RNAi sequence
uggagguuaauguugucuacug

SEQ ID NO: 8011 - RNA, 22 nt, Artificial Sequence
  Synthesized RNAi sequence
uggaguguuaacaaugcagugg

SEQ ID NO: 8012 - RNA, 22 nt, Artificial Sequence
  Synthesized RNAi sequence
uggaugaagauugccauuaaug

SEQ ID NO: 8013 - RNA, 22 nt, Artificial Sequence
  Synthesized RNAi sequence
uggauggaaccauucuucacug

SEQ ID NO: 8014 - RNA, 22 nt, Artificial Sequence
  Synthesized RNAi sequence
uggauuaaacuucaacucuauu

SEQ ID NO: 8015 - RNA, 22 nt, Artificial Sequence
  Synthesized RNAi sequence
uggcaagauaacaguuguuauc

SEQ ID NO: 8016 - RNA, 22 nt, Artificial Sequence
  Synthesized RNAi sequence
uggcaccaaauuccaaagguuu

SEQ ID NO: 8017 - RNA, 22 nt, Artificial Sequence
  Synthesized RNAi sequence
uggcacuuugagagaucucaua

SEQ ID NO: 8018 - RNA, 22 nt, Artificial Sequence
  Synthesized RNAi sequence
uggcacuuuucucaaagcuuuc

SEQ ID NO: 8019 - RNA, 22 nt, Artificial Sequence
  Synthesized RNAi sequence
uggcauguugaaacaaguaacu

SEQ ID NO: 8020 - RNA, 22 nt, Artificial Sequence
  Synthesized RNAi sequence
uggcauuguaacaagaguuuca

SEQ ID NO: 8021 - RNA, 22 nt, Artificial Sequence
  Synthesized RNAi sequence
uggcauuguuaguagccuuauu

SEQ ID NO: 8022 - RNA, 22 nt, Artificial Sequence
  Synthesized RNAi sequence
uggcucaaacucuucuucuuca

SEQ ID NO: 8023 - RNA, 22 nt, Artificial Sequence
  Synthesized RNAi sequence
uggcugcauuaacaaccacugu

SEQ ID NO: 8024 - RNA, 22 nt, Artificial Sequence
  Synthesized RNAi sequence
uggcuuaacuuccucuuuagga

SEQ ID NO: 8025 - RNA, 22 nt, Artificial Sequence
  Synthesized RNAi sequence
uggcuuuauuaguugcauuguu

SEQ ID NO: 8026 - RNA, 22 nt, Artificial Sequence
  Synthesized RNAi sequence
ugggccgacaacaugaagacag

SEQ ID NO: 8027 - RNA, 22 nt, Artificial Sequence
  Synthesized RNAi sequence
ugguaaucaucuucaguaccau

SEQ ID NO: 8028 - RNA, 22 nt, Artificial Sequence
  Synthesized RNAi sequence
ugguaauuaccaguguacucac

SEQ ID NO: 8029 - RNA, 22 nt, Artificial Sequence
  Synthesized RNAi sequence
ugguaauuuguauaguuucuaa

SEQ ID NO: 8030 - RNA, 22 nt, Artificial Sequence
  Synthesized RNAi sequence
ugguaggauuacuaguguaaua

SEQ ID NO: 8031 - RNA, 22 nt, Artificial Sequence
  Synthesized RNAi sequence
ugguaggauuuuccacuacuuc

SEQ ID NO: 8032 - RNA, 22 nt, Artificial Sequence
  Synthesized RNAi sequence
ugguaguacucaaaagccucaa

SEQ ID NO: 8033 - RNA, 22 nt, Artificial Sequence
  Synthesized RNAi sequence
uggucaguaggauuuauugguc

SEQ ID NO: 8034 - RNA, 22 nt, Artificial Sequence
  Synthesized RNAi sequence
ugguccauuaguagcuauguaa

SEQ ID NO: 8035 - RNA, 22 nt, Artificial Sequence
  Synthesized RNAi sequence
uggugcaaguagaacuucgugc

SEQ ID NO: 8036 - RNA, 22 nt, Artificial Sequence
  Synthesized RNAi sequence
uggugcugacaucauaacaaaa

SEQ ID NO: 8037 - RNA, 22 nt, Artificial Sequence
  Synthesized RNAi sequence
ugguguaaaaguaaaaucuagc

SEQ ID NO: 8038 - RNA, 22 nt, Artificial Sequence
  Synthesized RNAi sequence
ugguguaaguaauucagauacu

SEQ ID NO: 8039 - RNA, 22 nt, Artificial Sequence
  Synthesized RNAi sequence
ugguguaaguuccaucucuaau

SEQ ID NO: 8040 - RNA, 22 nt, Artificial Sequence
  Synthesized RNAi sequence
ugguuuaaguauaaugucuccu

SEQ ID NO: 8041 - RNA, 22 nt, Artificial Sequence
  Synthesized RNAi sequence
ugguuuauacguggcuuuauua

SEQ ID NO: 8042 - RNA, 22 nt, Artificial Sequence
  Synthesized RNAi sequence
ugguuucaauaaaauguucuuc

SEQ ID NO: 8043 - RNA, 22 nt, Artificial Sequence
  Synthesized RNAi sequence
ugguuuuagaucuucgcaggca

SEQ ID NO: 8044 - RNA, 22 nt, Artificial Sequence
  Synthesized RNAi sequence
ugguuuuaugguuguuguguaa

SEQ ID NO: 8045 - RNA, 22 nt, Artificial Sequence
  Synthesized RNAi sequence
ugguuuugugcuccaaagacaa

SEQ ID NO: 8046 - RNA, 22 nt, Artificial Sequence
  Synthesized RNAi sequence
uguaaaaguaaaaucuagcacc

SEQ ID NO: 8047 - RNA, 22 nt, Artificial Sequence
  Synthesized RNAi sequence
uguaaacaccuuaauaguccuc

SEQ ID NO: 8048 - RNA, 22 nt, Artificial Sequence
  Synthesized RNAi sequence
uguaacaagaguuucauuuaga

SEQ ID NO: 8049 - RNA, 22 nt, Artificial Sequence
  Synthesized RNAi sequence
uguaacaauuuagcuccuuucu

SEQ ID NO: 8050 - RNA, 22 nt, Artificial Sequence
  Synthesized RNAi sequence
uguaacacaucauacaaguuga

SEQ ID NO: 8051 - RNA, 22 nt, Artificial Sequence
  Synthesized RNAi sequence
uguaacacuaucaacgauguaa

SEQ ID NO: 8052 - RNA, 22 nt, Artificial Sequence
  Synthesized RNAi sequence
uguaacagcaucaggugaagaa

SEQ ID NO: 8053 - RNA, 22 nt, Artificial Sequence
  Synthesized RNAi sequence
uguaaccaguacaguaagaagg

SEQ ID NO: 8054 - RNA, 22 nt, Artificial Sequence
  Synthesized RNAi sequence
uguaaccauuuaaacccugacc

SEQ ID NO: 8055 - RNA, 22 nt, Artificial Sequence
  Synthesized RNAi sequence
uguaaccuugcacuucuaucac

SEQ ID NO: 8056 - RNA, 22 nt, Artificial Sequence
  Synthesized RNAi sequence
uguaacuauguuaguaguugua

SEQ ID NO: 8057 - RNA, 22 nt, Artificial Sequence
  Synthesized RNAi sequence
uguaacuucuucaacacaagcu

SEQ ID NO: 8058 - RNA, 22 nt, Artificial Sequence
  Synthesized RNAi sequence
uguaagaagacuggucaguagg

SEQ ID NO: 8059 - RNA, 22 nt, Artificial Sequence
  Synthesized RNAi sequence
uguaaguaaagcaccgucuaug

SEQ ID NO: 8060 - RNA, 22 nt, Artificial Sequence
  Synthesized RNAi sequence
uguaaguuccaucucuaauuga

SEQ ID NO: 8061 - RNA, 22 nt, Artificial Sequence
  Synthesized RNAi sequence
uguaauaagcaucuuguagagc

SEQ ID NO: 8062 - RNA, 22 nt, Artificial Sequence
  Synthesized RNAi sequence
uguaauauacacuuuuaucacc

SEQ ID NO: 8063 - RNA, 22 nt, Artificial Sequence
  Synthesized RNAi sequence
uguaaucaucagauucaacuug

SEQ ID NO: 8064 - RNA, 22 nt, Artificial Sequence
  Synthesized RNAi sequence
uguacaagauuaauuauuaacc

SEQ ID NO: 8065 - RNA, 22 nt, Artificial Sequence
  Synthesized RNAi sequence
uguacauaacagcuucuacacc

SEQ ID NO: 8066 - RNA, 22 nt, Artificial Sequence
  Synthesized RNAi sequence
uguacauucgacucuuguugcu

SEQ ID NO: 8067 - RNA, 22 nt, Artificial Sequence
  Synthesized RNAi sequence
uguacauucuaaccauagcuga

SEQ ID NO: 8068 - RNA, 22 nt, Artificial Sequence
  Synthesized RNAi sequence
uguaccaugcuuaaguucauac

SEQ ID NO: 8069 - RNA, 22 nt, Artificial Sequence
  Synthesized RNAi sequence
uguaccgaguucaacuguauag

SEQ ID NO: 8070 - RNA, 22 nt, Artificial Sequence
  Synthesized RNAi sequence
uguaccuacccagaaaacuagg

SEQ ID NO: 8071 - RNA, 22 nt, Artificial Sequence
  Synthesized RNAi sequence
uguacuaacaacuuuguuaaga

SEQ ID NO: 8072 - RNA, 22 nt, Artificial Sequence
  Synthesized RNAi sequence
uguacuaccagcacagaaugua

SEQ ID NO: 8073 - RNA, 22 nt, Artificial Sequence
  Synthesized RNAi sequence
uguacuagauauuuuguagcuu

SEQ ID NO: 8074 - RNA, 22 nt, Artificial Sequence
  Synthesized RNAi sequence
uguacucacuagcacaaguaaa

SEQ ID NO: 8075 - RNA, 22 nt, Artificial Sequence
  Synthesized RNAi sequence
uguagaaaacauccguaauagg

SEQ ID NO: 8076 - RNA, 22 nt, Artificial Sequence
  Synthesized RNAi sequence
uguagagcagguggauuaaacu

SEQ ID NO: 8077 - RNA, 22 nt, Artificial Sequence
  Synthesized RNAi sequence
uguagauuguccagaauaggac

SEQ ID NO: 8078 - RNA, 22 nt, Artificial Sequence
  Synthesized RNAi sequence
uguagccauacuccacucaucu

SEQ ID NO: 8079 - RNA, 22 nt, Artificial Sequence
  Synthesized RNAi sequence
uguagcuggcacuuugagagau

SEQ ID NO: 8080 - RNA, 22 nt, Artificial Sequence
  Synthesized RNAi sequence
uguagcuuguuuaccacacgua

SEQ ID NO: 8081 - RNA, 22 nt, Artificial Sequence
  Synthesized RNAi sequence
uguaguaaacagacgcugauuu

SEQ ID NO: 8082 - RNA, 22 nt, Artificial Sequence
  Synthesized RNAi sequence
uguagugacaagucucucgcaa

SEQ ID NO: 8083 - RNA, 22 nt, Artificial Sequence
  Synthesized RNAi sequence
uguaguguuuauaaucaauagc

SEQ ID NO: 8084 - RNA, 22 nt, Artificial Sequence
  Synthesized RNAi sequence
uguauaggcagagcacuucuca

SEQ ID NO: 8085 - RNA, 22 nt, Artificial Sequence
  Synthesized RNAi sequence
uguauaguugaaacuauggcuu

SEQ ID NO: 8086 - RNA, 22 nt, Artificial Sequence
  Synthesized RNAi sequence
uguauaguuucuaaagaaggau

SEQ ID NO: 8087 - RNA, 22 nt, Artificial Sequence
  Synthesized RNAi sequence
uguaugguaggauuuuccacua

SEQ ID NO: 8088 - RNA, 22 nt, Artificial Sequence
  Synthesized RNAi sequence
uguauucugaggacuuuguaag

SEQ ID NO: 8089 - RNA, 22 nt, Artificial Sequence
  Synthesized RNAi sequence
uguauuuuaauacccuuauauu

SEQ ID NO: 8090 - RNA, 22 nt, Artificial Sequence
  Synthesized RNAi sequence
ugucaaaggugauaacuucacc

SEQ ID NO: 8091 - RNA, 22 nt, Artificial Sequence
  Synthesized RNAi sequence
ugucaauauaaaguaacaaguu

SEQ ID NO: 8092 - RNA, 22 nt, Artificial Sequence
  Synthesized RNAi sequence
ugucaaugucacuaacaagagu

SEQ ID NO: 8093 - RNA, 22 nt, Artificial Sequence
  Synthesized RNAi sequence
ugucacuaacaagaguggcaga

SEQ ID NO: 8094 - RNA, 22 nt, Artificial Sequence
  Synthesized RNAi sequence
ugucaguaaguuuuaaauaacc

SEQ ID NO: 8095 - RNA, 22 nt, Artificial Sequence
  Synthesized RNAi sequence
ugucaucauuagguaaaacaua

SEQ ID NO: 8096 - RNA, 22 nt, Artificial Sequence
  Synthesized RNAi sequence
ugucauguuuucaacuuuguua

SEQ ID NO: 8097 - RNA, 22 nt, Artificial Sequence
  Synthesized RNAi sequence
ugucauugacauguccacaacu

SEQ ID NO: 8098 - RNA, 22 nt, Artificial Sequence
  Synthesized RNAi sequence
uguccaacuuagggucaauuuc

SEQ ID NO: 8099 - RNA, 22 nt, Artificial Sequence
  Synthesized RNAi sequence
uguccacaacuugcguguggag

SEQ ID NO: 8100 - RNA, 22 nt, Artificial Sequence
  Synthesized RNAi sequence
uguccagaauaggaccaaucuu

SEQ ID NO: 8101 - RNA, 22 nt, Artificial Sequence
  Synthesized RNAi sequence
uguccauaugucauugacaugu

SEQ ID NO: 8102 - RNA, 22 nt, Artificial Sequence
  Synthesized RNAi sequence
uguccgcuuaaaacacaacuac

SEQ ID NO: 8103 - RNA, 22 nt, Artificial Sequence
  Synthesized RNAi sequence
uguccucacugccgucuuguug

SEQ ID NO: 8104 - RNA, 22 nt, Artificial Sequence
  Synthesized RNAi sequence
ugucuaaagaaucuaaaccacu

SEQ ID NO: 8105 - RNA, 22 nt, Artificial Sequence
  Synthesized RNAi sequence
ugucuaaggacacauucuuugc

SEQ ID NO: 8106 - RNA, 22 nt, Artificial Sequence
  Synthesized RNAi sequence
ugucuacauaagcagccauuag

SEQ ID NO: 8107 - RNA, 22 nt, Artificial Sequence
  Synthesized RNAi sequence
ugucuaguaguugcacauguca

SEQ ID NO: 8108 - RNA, 22 nt, Artificial Sequence
  Synthesized RNAi sequence
ugucuccuacaacuucgguagu

SEQ ID NO: 8109 - RNA, 22 nt, Artificial Sequence
  Synthesized RNAi sequence
ugucugauuguccucacugccg

SEQ ID NO: 8110 - RNA, 22 nt, Artificial Sequence
  Synthesized RNAi sequence
ugucugcuguuguccacaaguu

SEQ ID NO: 8111 - RNA, 22 nt, Artificial Sequence
  Synthesized RNAi sequence
ugucuguuggcacuuuucucaa

SEQ ID NO: 8112 - RNA, 22 nt, Artificial Sequence
  Synthesized RNAi sequence
ugucuuaagauugucaaaggug

SEQ ID NO: 8113 - RNA, 22 nt, Artificial Sequence
  Synthesized RNAi sequence
ugucuucaccuuuguuaacauu

SEQ ID NO: 8114 - RNA, 22 nt, Artificial Sequence
  Synthesized RNAi sequence
ugucuuucauaagucuuuugac

SEQ ID NO: 8115 - RNA, 22 nt, Artificial Sequence
  Synthesized RNAi sequence
ugucuuucuuauaauaauuguc

SEQ ID NO: 8116 - RNA, 22 nt, Artificial Sequence
  Synthesized RNAi sequence
ugugaauuaugagguuuuauuu

SEQ ID NO: 8117 - RNA, 22 nt, Artificial Sequence
  Synthesized RNAi sequence
ugugacaauuuaagacauucaa

SEQ ID NO: 8118 - RNA, 22 nt, Artificial Sequence
  Synthesized RNAi sequence
ugugaggaacuuaguuucuucc

SEQ ID NO: 8119 - RNA, 22 nt, Artificial Sequence
  Synthesized RNAi sequence
ugugcaagcauuucucgcaaau

SEQ ID NO: 8120 - RNA, 22 nt, Artificial Sequence
  Synthesized RNAi sequence
ugugcccauguacauaacagcu

SEQ ID NO: 8121 - RNA, 22 nt, Artificial Sequence
  Synthesized RNAi sequence
ugugcgaacaguaucuacacaa

SEQ ID NO: 8122 - RNA, 22 nt, Artificial Sequence
  Synthesized RNAi sequence
ugugcuccaaagacaacguaua

SEQ ID NO: 8123 - RNA, 22 nt, Artificial Sequence
  Synthesized RNAi sequence
uguggagguuaauguugucuac

SEQ ID NO: 8124 - RNA, 22 nt, Artificial Sequence
  Synthesized RNAi sequence
ugugguaggauuacuaguguaa

SEQ ID NO: 8125 - RNA, 22 nt, Artificial Sequence
  Synthesized RNAi sequence
ugugguaguacucaaaagccuc

SEQ ID NO: 8126 - RNA, 22 nt, Artificial Sequence
  Synthesized RNAi sequence
uguguaacuguuuucuuuguag

SEQ ID NO: 8127 - RNA, 22 nt, Artificial Sequence
  Synthesized RNAi sequence
uguguagauuguccagaauagg

SEQ ID NO: 8128 - RNA, 22 nt, Artificial Sequence
  Synthesized RNAi sequence
uguguaguguuuauaaucaaua

SEQ ID NO: 8129 - RNA, 22 nt, Artificial Sequence
  Synthesized RNAi sequence
uguguccgcuuaaaacacaacu

SEQ ID NO: 8130 - RNA, 22 nt, Artificial Sequence
  Synthesized RNAi sequence
ugugugguaguacucaaaagcc

SEQ ID NO: 8131 - RNA, 22 nt, Artificial Sequence
  Synthesized RNAi sequence
uguguuacauagccaaguggca

SEQ ID NO: 8132 - RNA, 22 nt, Artificial Sequence
  Synthesized RNAi sequence
uguguugauaagugacgcuaca

SEQ ID NO: 8133 - RNA, 22 nt, Artificial Sequence
  Synthesized RNAi sequence
uguuaacaaugcaguggcaaga

SEQ ID NO: 8134 - RNA, 22 nt, Artificial Sequence
  Synthesized RNAi sequence
uguuaacaugccaaacaauagg

SEQ ID NO: 8135 - RNA, 22 nt, Artificial Sequence
  Synthesized RNAi sequence
uguuaacauuugggccgacaac

SEQ ID NO: 8136 - RNA, 22 nt, Artificial Sequence
  Synthesized RNAi sequence
uguuaagaaaaggcuuagcaua

SEQ ID NO: 8137 - RNA, 22 nt, Artificial Sequence
  Synthesized RNAi sequence
uguuacaacauuaacaacuugu

SEQ ID NO: 8138 - RNA, 22 nt, Artificial Sequence
  Synthesized RNAi sequence
uguuacauagccaaguggcauu

SEQ ID NO: 8139 - RNA, 22 nt, Artificial Sequence
  Synthesized RNAi sequence
uguuaguagccuuauuuaaggc

SEQ ID NO: 8140 - RNA, 22 nt, Artificial Sequence
  Synthesized RNAi sequence
uguuaguaguuguacuaacaac

SEQ ID NO: 8141 - RNA, 22 nt, Artificial Sequence
  Synthesized RNAi sequence
uguuauaggugagcauauaguu

SEQ ID NO: 8142 - RNA, 22 nt, Artificial Sequence
  Synthesized RNAi sequence
uguuaucugcccauuuaauaga

SEQ ID NO: 8143 - RNA, 22 nt, Artificial Sequence
  Synthesized RNAi sequence
uguuauuagcucucagguuguc

SEQ ID NO: 8144 - RNA, 22 nt, Artificial Sequence
  Synthesized RNAi sequence
uguucaacugaagguuuacuuu

SEQ ID NO: 8145 - RNA, 22 nt, Artificial Sequence
  Synthesized RNAi sequence
uguucagacaaugacaugaaau

SEQ ID NO: 8146 - RNA, 22 nt, Artificial Sequence
  Synthesized RNAi sequence
uguucauaagaaagugugccca

SEQ ID NO: 8147 - RNA, 22 nt, Artificial Sequence
  Synthesized RNAi sequence
uguucuucagguguuuuagaag

SEQ ID NO: 8148 - RNA, 22 nt, Artificial Sequence
  Synthesized RNAi sequence
uguugaaacaaguaacucauug

SEQ ID NO: 8149 - RNA, 22 nt, Artificial Sequence
  Synthesized RNAi sequence
uguugaccaacaguuuguugac

SEQ ID NO: 8150 - RNA, 22 nt, Artificial Sequence
  Synthesized RNAi sequence
uguugacuaucaucaucuaacc

SEQ ID NO: 8151 - RNA, 22 nt, Artificial Sequence
  Synthesized RNAi sequence
uguugauaagugacgcuacagu

SEQ ID NO: 8152 - RNA, 22 nt, Artificial Sequence
  Synthesized RNAi sequence
uguugcucuauuacguuuguaa

SEQ ID NO: 8153 - RNA, 22 nt, Artificial Sequence
  Synthesized RNAi sequence
uguuggaguguuaacaaugcag

SEQ ID NO: 8154 - RNA, 22 nt, Artificial Sequence
  Synthesized RNAi sequence
uguuggcacuuuucucaaagcu

SEQ ID NO: 8155 - RNA, 22 nt, Artificial Sequence
  Synthesized RNAi sequence
uguuguaaacaccuuaauaguc

SEQ ID NO: 8156 - RNA, 22 nt, Artificial Sequence
  Synthesized RNAi sequence
uguuguaacuucuucaacacaa

SEQ ID NO: 8157 - RNA, 22 nt, Artificial Sequence
  Synthesized RNAi sequence
uguuguacuagauauuuuguag

SEQ ID NO: 8158 - RNA, 22 nt, Artificial Sequence
  Synthesized RNAi sequence
uguuguccacaaguuuuacaca

SEQ ID NO: 8159 - RNA, 22 nt, Artificial Sequence
  Synthesized RNAi sequence
uguuguccauaugucauugaca

SEQ ID NO: 8160 - RNA, 22 nt, Artificial Sequence
  Synthesized RNAi sequence
uguugucuacuguuguaaacac

SEQ ID NO: 8161 - RNA, 22 nt, Artificial Sequence
  Synthesized RNAi sequence
uguuguguaacuguuuucuuug

SEQ ID NO: 8162 - RNA, 22 nt, Artificial Sequence
  Synthesized RNAi sequence
uguuguuacaacauuaacaacu

SEQ ID NO: 8163 - RNA, 22 nt, Artificial Sequence
  Synthesized RNAi sequence
uguuuaagguaaacauuggcug

SEQ ID NO: 8164 - RNA, 22 nt, Artificial Sequence
  Synthesized RNAi sequence
uguuuaccacacguacaaggua

SEQ ID NO: 8165 - RNA, 22 nt, Artificial Sequence
  Synthesized RNAi sequence
uguuuagcaagauuguguccgc

SEQ ID NO: 8166 - RNA, 22 nt, Artificial Sequence
  Synthesized RNAi sequence
uguuuauaaucaauagccacca

SEQ ID NO: 8167 - RNA, 22 nt, Artificial Sequence
  Synthesized RNAi sequence
uguuuauagugaccacacuggu

SEQ ID NO: 8168 - RNA, 22 nt, Artificial Sequence
  Synthesized RNAi sequence
uguuucaacugguuuugugcuc

SEQ ID NO: 8169 - RNA, 22 nt, Artificial Sequence
  Synthesized RNAi sequence
uguuucucuaacaucaccuaac

SEQ ID NO: 8170 - RNA, 22 nt, Artificial Sequence
  Synthesized RNAi sequence
uguuucuucugcaugugcaagc

SEQ ID NO: 8171 - RNA, 22 nt, Artificial Sequence
  Synthesized RNAi sequence
uguuuuaccuucaugugaauua

SEQ ID NO: 8172 - RNA, 22 nt, Artificial Sequence
  Synthesized RNAi sequence
uguuuuacugguguaaaaguaa

SEQ ID NO: 8173 - RNA, 22 nt, Artificial Sequence
  Synthesized RNAi sequence
uguuuucaacuuuguuauaggu

SEQ ID NO: 8174 - RNA, 22 nt, Artificial Sequence
  Synthesized RNAi sequence
uguuuucguaguuguucagaca

SEQ ID NO: 8175 - RNA, 22 nt, Artificial Sequence
  Synthesized RNAi sequence
uguuuucucuguucaacugaag

SEQ ID NO: 8176 - RNA, 22 nt, Artificial Sequence
  Synthesized RNAi sequence
uguuuucuuuguagaaaacauc

SEQ ID NO: 8177 - RNA, 22 nt, Artificial Sequence
  Synthesized RNAi sequence
uuaaaacacaacuaccacccac

SEQ ID NO: 8178 - RNA, 22 nt, Artificial Sequence
  Synthesized RNAi sequence
uuaaaacacccucuugaacaac

SEQ ID NO: 8179 - RNA, 22 nt, Artificial Sequence
  Synthesized RNAi sequence
uuaaaacaccuaaagcagcggu

SEQ ID NO: 8180 - RNA, 22 nt, Artificial Sequence
  Synthesized RNAi sequence
uuaaaagaggguguguaguguu

SEQ ID NO: 8181 - RNA, 22 nt, Artificial Sequence
  Synthesized RNAi sequence
uuaaaagaugaaaugguaauuu

SEQ ID NO: 8182 - RNA, 22 nt, Artificial Sequence
  Synthesized RNAi sequence
uuaaaaguugaugaaaacguau

SEQ ID NO: 8183 - RNA, 22 nt, Artificial Sequence
  Synthesized RNAi sequence
uuaaaauuaucgaagcuugcgu

SEQ ID NO: 8184 - RNA, 22 nt, Artificial Sequence
  Synthesized RNAi sequence
uuaaaauuuucauaagcacucu

SEQ ID NO: 8185 - RNA, 22 nt, Artificial Sequence
  Synthesized RNAi sequence
uuaaacaccguguaacuauguu

SEQ ID NO: 8186 - RNA, 22 nt, Artificial Sequence
  Synthesized RNAi sequence
uuaaacccugacccggguaagu

SEQ ID NO: 8187 - RNA, 22 nt, Artificial Sequence
  Synthesized RNAi sequence
uuaaacucaccagacucaucaa

SEQ ID NO: 8188 - RNA, 22 nt, Artificial Sequence
  Synthesized RNAi sequence
uuaaacuguagugacaagucuc

SEQ ID NO: 8189 - RNA, 22 nt, Artificial Sequence
  Synthesized RNAi sequence
uuaaacuucaacucuauuuguu

SEQ ID NO: 8190 - RNA, 22 nt, Artificial Sequence
  Synthesized RNAi sequence
uuaaauaaccacuaaaacuauu

SEQ ID NO: 8191 - RNA, 22 nt, Artificial Sequence
  Synthesized RNAi sequence
uuaaaucaucagcaaauuugau

SEQ ID NO: 8192 - RNA, 22 nt, Artificial Sequence
  Synthesized RNAi sequence
uuaaaugaagccucuagacaaa

SEQ ID NO: 8193 - RNA, 22 nt, Artificial Sequence
  Synthesized RNAi sequence
uuaaauuguucauaagaaagug

SEQ ID NO: 8194 - RNA, 22 nt, Artificial Sequence
  Synthesized RNAi sequence
uuaacaaaaugagagagagaau

SEQ ID NO: 8195 - RNA, 22 nt, Artificial Sequence
  Synthesized RNAi sequence
uuaacaacuugucuaguaguug

SEQ ID NO: 8196 - RNA, 22 nt, Artificial Sequence
  Synthesized RNAi sequence
uuaacaauaguuguacauucga

SEQ ID NO: 8197 - RNA, 22 nt, Artificial Sequence
  Synthesized RNAi sequence
uuaacaaugcaguggcaagaua

SEQ ID NO: 8198 - RNA, 22 nt, Artificial Sequence
  Synthesized RNAi sequence
uuaacaauuuuaccacccuuaa

SEQ ID NO: 8199 - RNA, 22 nt, Artificial Sequence
  Synthesized RNAi sequence
uuaacagcagcuaaaccaugag

SEQ ID NO: 8200 - RNA, 22 nt, Artificial Sequence
  Synthesized RNAi sequence
uuaacaguauucuuugcuauag

SEQ ID NO: 8201 - RNA, 22 nt, Artificial Sequence
  Synthesized RNAi sequence
uuaacaugccaaacaauagguu

SEQ ID NO: 8202 - RNA, 22 nt, Artificial Sequence
  Synthesized RNAi sequence
uuaacauuugggccgacaacau

SEQ ID NO: 8203 - RNA, 22 nt, Artificial Sequence
  Synthesized RNAi sequence
uuaaccacauaagccaagaauu

SEQ ID NO: 8204 - RNA, 22 nt, Artificial Sequence
  Synthesized RNAi sequence
uuaacguaagcaucaaacauuu

SEQ ID NO: 8205 - RNA, 22 nt, Artificial Sequence
  Synthesized RNAi sequence
uuaacugcaacuuccgcacuau

SEQ ID NO: 8206 - RNA, 22 nt, Artificial Sequence
  Synthesized RNAi sequence
uuaacugcuucaaccaauuauu

SEQ ID NO: 8207 - RNA, 22 nt, Artificial Sequence
  Synthesized RNAi sequence
uuaacugguuuaaaucaucagc

SEQ ID NO: 8208 - RNA, 22 nt, Artificial Sequence
  Synthesized RNAi sequence
uuaacuuccucuuuaggaaucu

SEQ ID NO: 8209 - RNA, 22 nt, Artificial Sequence
  Synthesized RNAi sequence
uuaagaaaaggcuuagcauaau

SEQ ID NO: 8210 - RNA, 22 nt, Artificial Sequence
  Synthesized RNAi sequence
uuaagaaagugaugucaauguc

SEQ ID NO: 8211 - RNA, 22 nt, Artificial Sequence
  Synthesized RNAi sequence
uuaagaaauucuauaccuaguu

SEQ ID NO: 8212 - RNA, 22 nt, Artificial Sequence
  Synthesized RNAi sequence
uuaagaaguugaaugucuucac

SEQ ID NO: 8213 - RNA, 22 nt, Artificial Sequence
  Synthesized RNAi sequence
uuaagacauucaacaacaucuu

SEQ ID NO: 8214 - RNA, 22 nt, Artificial Sequence
  Synthesized RNAi sequence
uuaagauugucaaaggugauaa

SEQ ID NO: 8215 - RNA, 22 nt, Artificial Sequence
  Synthesized RNAi sequence
uuaagccauguguuacauagcc

SEQ ID NO: 8216 - RNA, 22 nt, Artificial Sequence
  Synthesized RNAi sequence
uuaaggcuccugcaacaccucc

SEQ ID NO: 8217 - RNA, 22 nt, Artificial Sequence
  Synthesized RNAi sequence
uuaaggguugucugcuguuguc

SEQ ID NO: 8218 - RNA, 22 nt, Artificial Sequence
  Synthesized RNAi sequence
uuaagguaaacauuggcugcau

SEQ ID NO: 8219 - RNA, 22 nt, Artificial Sequence
  Synthesized RNAi sequence
uuaaguauaaugucuccuacaa

SEQ ID NO: 8220 - RNA, 22 nt, Artificial Sequence
  Synthesized RNAi sequence
uuaagugcuaucuuuguuguua

SEQ ID NO: 8221 - RNA, 22 nt, Artificial Sequence
  Synthesized RNAi sequence
uuaagugguccauuaguagcua

SEQ ID NO: 8222 - RNA, 22 nt, Artificial Sequence
  Synthesized RNAi sequence
uuaaguguguugauaagugacg

SEQ ID NO: 8223 - RNA, 22 nt, Artificial Sequence
  Synthesized RNAi sequence
uuaaguucauacugagcaggug

SEQ ID NO: 8224 - RNA, 22 nt, Artificial Sequence
  Synthesized RNAi sequence
uuaauacccuuauauuuacgcu

SEQ ID NO: 8225 - RNA, 22 nt, Artificial Sequence
  Synthesized RNAi sequence
uuaauagaaguuaaaccauuaa

SEQ ID NO: 8226 - RNA, 22 nt, Artificial Sequence
  Synthesized RNAi sequence
uuaauaguaagacuagaauugu

SEQ ID NO: 8227 - RNA, 22 nt, Artificial Sequence
  Synthesized RNAi sequence
uuaauaguccucacuucucuca

SEQ ID NO: 8228 - RNA, 22 nt, Artificial Sequence
  Synthesized RNAi sequence
uuaauaugacgcgcacuacagu

SEQ ID NO: 8229 - RNA, 22 nt, Artificial Sequence
  Synthesized RNAi sequence
uuaaugucaauauaaaguaaca

SEQ ID NO: 8230 - RNA, 22 nt, Artificial Sequence
  Synthesized RNAi sequence
uuaauguugucuacuguuguaa

SEQ ID NO: 8231 - RNA, 22 nt, Artificial Sequence
  Synthesized RNAi sequence
uuaauuauuaaccacauaagcc

SEQ ID NO: 8232 - RNA, 22 nt, Artificial Sequence
  Synthesized RNAi sequence
uuaauucuagaauuuguacuuc

SEQ ID NO: 8233 - RNA, 22 nt, Artificial Sequence
  Synthesized RNAi sequence
uuaauuugcguguuucuucugc

SEQ ID NO: 8234 - RNA, 22 nt, Artificial Sequence
  Synthesized RNAi sequence
uuacaacauuaacaacuugucu

SEQ ID NO: 8235 - RNA, 22 nt, Artificial Sequence
  Synthesized RNAi sequence
uuacaaccgucuacaacaugca

SEQ ID NO: 8236 - RNA, 22 nt, Artificial Sequence
  Synthesized RNAi sequence
uuacaacuaucgccaguaacuu

SEQ ID NO: 8237 - RNA, 22 nt, Artificial Sequence
  Synthesized RNAi sequence
uuacacaccacguucaagacuc

SEQ ID NO: 8238 - RNA, 22 nt, Artificial Sequence
  Synthesized RNAi sequence
uuacacucaagaacgucuuucu

SEQ ID NO: 8239 - RNA, 22 nt, Artificial Sequence
  Synthesized RNAi sequence
uuacaguaggcuaagauaagug

SEQ ID NO: 8240 - RNA, 22 nt, Artificial Sequence
  Synthesized RNAi sequence
uuacauagccaaguggcauugu

SEQ ID NO: 8241 - RNA, 22 nt, Artificial Sequence
  Synthesized RNAi sequence
uuaccacacguacaagguaucu

SEQ ID NO: 8242 - RNA, 22 nt, Artificial Sequence
  Synthesized RNAi sequence
uuaccacccuuaagugcuaucu

SEQ ID NO: 8243 - RNA, 22 nt, Artificial Sequence
  Synthesized RNAi sequence
uuaccaguguacucacuagcac

SEQ ID NO: 8244 - RNA, 22 nt, Artificial Sequence
  Synthesized RNAi sequence
uuaccgacacucuuaacaguau

SEQ ID NO: 8245 - RNA, 22 nt, Artificial Sequence
  Synthesized RNAi sequence
uuaccuccauuagcauagacau

SEQ ID NO: 8246 - RNA, 22 nt, Artificial Sequence
  Synthesized RNAi sequence
uuaccuucaugugaauuaugag

SEQ ID NO: 8247 - RNA, 22 nt, Artificial Sequence
  Synthesized RNAi sequence
uuaccuugguaaucaucuucag

SEQ ID NO: 8248 - RNA, 22 nt, Artificial Sequence
  Synthesized RNAi sequence
uuacgcuguauaguugaaacua

SEQ ID NO: 8249 - RNA, 22 nt, Artificial Sequence
  Synthesized RNAi sequence
uuacguuuguaacacaucauac

SEQ ID NO: 8250 - RNA, 22 nt, Artificial Sequence
  Synthesized RNAi sequence
uuacuaguguaauauacacuuu

SEQ ID NO: 8251 - RNA, 22 nt, Artificial Sequence
  Synthesized RNAi sequence
uuacugguguaaaaguaaaauc

SEQ ID NO: 8252 - RNA, 22 nt, Artificial Sequence
  Synthesized RNAi sequence
uuacuucuguaccgaguucaac

SEQ ID NO: 8253 - RNA, 22 nt, Artificial Sequence
  Synthesized RNAi sequence
uuacuuucaguuauaaauggcu

SEQ ID NO: 8254 - RNA, 22 nt, Artificial Sequence
  Synthesized RNAi sequence
uuagaagaagaaguaagauaac

SEQ ID NO: 8255 - RNA, 22 nt, Artificial Sequence
  Synthesized RNAi sequence
uuagaaguuauauguuuauagu

SEQ ID NO: 8256 - RNA, 22 nt, Artificial Sequence
  Synthesized RNAi sequence
uuagacauuaaaacaccuaaag

SEQ ID NO: 8257 - RNA, 22 nt, Artificial Sequence
  Synthesized RNAi sequence
uuagagauaauagaugguagaa

SEQ ID NO: 8258 - RNA, 22 nt, Artificial Sequence
  Synthesized RNAi sequence
uuagaucguuaaguguguugau

SEQ ID NO: 8259 - RNA, 22 nt, Artificial Sequence
  Synthesized RNAi sequence
uuagaucuucgcaggcaagauu

SEQ ID NO: 8260 - RNA, 22 nt, Artificial Sequence
  Synthesized RNAi sequence
uuagcaagauuguguccgcuua

SEQ ID NO: 8261 - RNA, 22 nt, Artificial Sequence
  Synthesized RNAi sequence
uuagcagcuucaccagcccuug

SEQ ID NO: 8262 - RNA, 22 nt, Artificial Sequence
  Synthesized RNAi sequence
uuagcauaauuagcuauaguau

SEQ ID NO: 8263 - RNA, 22 nt, Artificial Sequence
  Synthesized RNAi sequence
uuagcuauaguaucccaaggga

SEQ ID NO: 8264 - RNA, 22 nt, Artificial Sequence
  Synthesized RNAi sequence
uuagcuccuuucuuaaaagagg

SEQ ID NO: 8265 - RNA, 22 nt, Artificial Sequence
  Synthesized RNAi sequence
uuagcucucagguugucuaagu

SEQ ID NO: 8266 - RNA, 22 nt, Artificial Sequence
  Synthesized RNAi sequence
uuagggucaauuucuguacaaa

SEQ ID NO: 8267 - RNA, 22 nt, Artificial Sequence
  Synthesized RNAi sequence
uuagguuucuuaauaguaagac

SEQ ID NO: 8268 - RNA, 22 nt, Artificial Sequence
  Synthesized RNAi sequence
uuaguaacaucagcuccaucca

SEQ ID NO: 8269 - RNA, 22 nt, Artificial Sequence
  Synthesized RNAi sequence
uuaguacaaacacgguuuaaac

SEQ ID NO: 8270 - RNA, 22 nt, Artificial Sequence
  Synthesized RNAi sequence
uuaguagccuuauuuaaggcuc

SEQ ID NO: 8271 - RNA, 22 nt, Artificial Sequence
  Synthesized RNAi sequence
uuaguagcuauguaaucaucag

SEQ ID NO: 8272 - RNA, 22 nt, Artificial Sequence
  Synthesized RNAi sequence
uuaguaguuguacuaacaacuu

SEQ ID NO: 8273 - RNA, 22 nt, Artificial Sequence
  Synthesized RNAi sequence
uuaguguuauuagcucucaggu

SEQ ID NO: 8274 - RNA, 22 nt, Artificial Sequence
  Synthesized RNAi sequence
uuaguuuccacacagacaggca

SEQ ID NO: 8275 - RNA, 22 nt, Artificial Sequence
  Synthesized RNAi sequence
uuaguuucuacaucugaaucaa

SEQ ID NO: 8276 - RNA, 22 nt, Artificial Sequence
  Synthesized RNAi sequence
uuaguuucuuccagaguuguug

SEQ ID NO: 8277 - RNA, 22 nt, Artificial Sequence
  Synthesized RNAi sequence
uuauaaauggcuuaacuuccuc

SEQ ID NO: 8278 - RNA, 22 nt, Artificial Sequence
  Synthesized RNAi sequence
uuauaaccaguuaacugguuua

SEQ ID NO: 8279 - RNA, 22 nt, Artificial Sequence
  Synthesized RNAi sequence
uuauaaguaacugguuuuaugg

SEQ ID NO: 8280 - RNA, 22 nt, Artificial Sequence
  Synthesized RNAi sequence
uuauaauaauuguccaacuuag

SEQ ID NO: 8281 - RNA, 22 nt, Artificial Sequence
  Synthesized RNAi sequence
uuauaaucaauagccaccacau

SEQ ID NO: 8282 - RNA, 22 nt, Artificial Sequence
  Synthesized RNAi sequence
uuauacgcuguaacagcaucag

SEQ ID NO: 8283 - RNA, 22 nt, Artificial Sequence
  Synthesized RNAi sequence
uuauacguggcuuuauuaguug

SEQ ID NO: 8284 - RNA, 22 nt, Artificial Sequence
  Synthesized RNAi sequence
uuauaggugagcauauaguuau

SEQ ID NO: 8285 - RNA, 22 nt, Artificial Sequence
  Synthesized RNAi sequence
uuauagugaccacacugguaau

SEQ ID NO: 8286 - RNA, 22 nt, Artificial Sequence
  Synthesized RNAi sequence
uuauauaauugucuguuggcac

SEQ ID NO: 8287 - RNA, 22 nt, Artificial Sequence
  Synthesized RNAi sequence
uuauauguuuauagugaccaca

SEQ ID NO: 8288 - RNA, 22 nt, Artificial Sequence
  Synthesized RNAi sequence
uuauauuuacgcuguauaguug

SEQ ID NO: 8289 - RNA, 22 nt, Artificial Sequence
  Synthesized RNAi sequence
uuaucaaaguaaagauggaugg

SEQ ID NO: 8290 - RNA, 22 nt, Artificial Sequence
  Synthesized RNAi sequence
uuaucaauccuuucaucaaguu

SEQ ID NO: 8291 - RNA, 22 nt, Artificial Sequence
  Synthesized RNAi sequence
uuaucacauacaaacuuaaaau

SEQ ID NO: 8292 - RNA, 22 nt, Artificial Sequence
  Synthesized RNAi sequence
uuaucaccucucuuaagaaauu

SEQ ID NO: 8293 - RNA, 22 nt, Artificial Sequence
  Synthesized RNAi sequence
uuauccauucccugcgcguccu

SEQ ID NO: 8294 - RNA, 22 nt, Artificial Sequence
  Synthesized RNAi sequence
uuaucgaagcuugcguuuggau

SEQ ID NO: 8295 - RNA, 22 nt, Artificial Sequence
  Synthesized RNAi sequence
uuaucugcccauuuaauagaag

SEQ ID NO: 8296 - RNA, 22 nt, Artificial Sequence
  Synthesized RNAi sequence
uuauguaacaauuuagcuccuu

SEQ ID NO: 8297 - RNA, 22 nt, Artificial Sequence
  Synthesized RNAi sequence
uuauuaacaauuuuaccacccu

SEQ ID NO: 8298 - RNA, 22 nt, Artificial Sequence
  Synthesized RNAi sequence
uuauuaaccacauaagccaaga

SEQ ID NO: 8299 - RNA, 22 nt, Artificial Sequence
  Synthesized RNAi sequence
uuauuacaacuaucgccaguaa

SEQ ID NO: 8300 - RNA, 22 nt, Artificial Sequence
  Synthesized RNAi sequence
uuauuacaguaggcuaagauaa

SEQ ID NO: 8301 - RNA, 22 nt, Artificial Sequence
  Synthesized RNAi sequence
uuauuagcucucagguugucua

SEQ ID NO: 8302 - RNA, 22 nt, Artificial Sequence
  Synthesized RNAi sequence
uuauuaguugcauuguuaacau

SEQ ID NO: 8303 - RNA, 22 nt, Artificial Sequence
  Synthesized RNAi sequence
uuauuggucuuuuaaacuguag

SEQ ID NO: 8304 - RNA, 22 nt, Artificial Sequence
  Synthesized RNAi sequence
uuauuuaaggcuccugcaacac

SEQ ID NO: 8305 - RNA, 22 nt, Artificial Sequence
  Synthesized RNAi sequence
uuauuuuaguaacaucagcucc

SEQ ID NO: 8306 - RNA, 22 nt, Artificial Sequence
  Synthesized RNAi sequence
uucaaaagugauauucacacuc

SEQ ID NO: 8307 - RNA, 22 nt, Artificial Sequence
  Synthesized RNAi sequence
uucaaaccuaauacucuagaua

SEQ ID NO: 8308 - RNA, 22 nt, Artificial Sequence
  Synthesized RNAi sequence
uucaaauagccuucucuguaac

SEQ ID NO: 8309 - RNA, 22 nt, Artificial Sequence
  Synthesized RNAi sequence
uucaacaacaucuuuaguuucu

SEQ ID NO: 8310 - RNA, 22 nt, Artificial Sequence
  Synthesized RNAi sequence
uucaacucuauuuguuggagug

SEQ ID NO: 8311 - RNA, 22 nt, Artificial Sequence
  Synthesized RNAi sequence
uucaacugaagguuuacuuuca

SEQ ID NO: 8312 - RNA, 22 nt, Artificial Sequence
  Synthesized RNAi sequence
uucaacugguuuugugcuccaa

SEQ ID NO: 8313 - RNA, 22 nt, Artificial Sequence
  Synthesized RNAi sequence
uucaacuguauaggcagagcac

SEQ ID NO: 8314 - RNA, 22 nt, Artificial Sequence
  Synthesized RNAi sequence
uucaacuugcauggcauuguua

SEQ ID NO: 8315 - RNA, 22 nt, Artificial Sequence
  Synthesized RNAi sequence
uucaacuuuguuauaggugagc

SEQ ID NO: 8316 - RNA, 22 nt, Artificial Sequence
  Synthesized RNAi sequence
uucaagacucuuuugcaagaau

SEQ ID NO: 8317 - RNA, 22 nt, Artificial Sequence
  Synthesized RNAi sequence
uucaauaaaauguucuucaggu

SEQ ID NO: 8318 - RNA, 22 nt, Artificial Sequence
  Synthesized RNAi sequence
uucaauagucugaacaacuggu

SEQ ID NO: 8319 - RNA, 22 nt, Artificial Sequence
  Synthesized RNAi sequence
uucacacucuuguaaccuugca

SEQ ID NO: 8320 - RNA, 22 nt, Artificial Sequence
  Synthesized RNAi sequence
uucacauuacacucaagaacgu

SEQ ID NO: 8321 - RNA, 22 nt, Artificial Sequence
  Synthesized RNAi sequence
uucaccagcccuugcucuguaa

SEQ ID NO: 8322 - RNA, 22 nt, Artificial Sequence
  Synthesized RNAi sequence
uucaccaucuagguggaaugug

SEQ ID NO: 8323 - RNA, 22 nt, Artificial Sequence
  Synthesized RNAi sequence
uucaccuuuguuaacauuuggg

SEQ ID NO: 8324 - RNA, 22 nt, Artificial Sequence
  Synthesized RNAi sequence
uucacuguaacacuaucaacga

SEQ ID NO: 8325 - RNA, 22 nt, Artificial Sequence
  Synthesized RNAi sequence
uucagagacugguuuuagaucu

SEQ ID NO: 8326 - RNA, 22 nt, Artificial Sequence
  Synthesized RNAi sequence
uucagcuucugcaguugcaacu

SEQ ID NO: 8327 - RNA, 22 nt, Artificial Sequence
  Synthesized RNAi sequence
uucagguugaagagcagcagaa

SEQ ID NO: 8328 - RNA, 22 nt, Artificial Sequence
  Synthesized RNAi sequence
uucaguacaucaaacgaauuug

SEQ ID NO: 8329 - RNA, 22 nt, Artificial Sequence
  Synthesized RNAi sequence
uucaguaccauacucauauuga

SEQ ID NO: 8330 - RNA, 22 nt, Artificial Sequence
  Synthesized RNAi sequence
uucaguuauaaauggcuuaacu

SEQ ID NO: 8331 - RNA, 22 nt, Artificial Sequence
  Synthesized RNAi sequence
uucauaagaaagugugcccaug

SEQ ID NO: 8332 - RNA, 22 nt, Artificial Sequence
  Synthesized RNAi sequence
uucauaagcacucuuaagaagu

SEQ ID NO: 8333 - RNA, 22 nt, Artificial Sequence
  Synthesized RNAi sequence
uucauaagucuuuugaccagcu

SEQ ID NO: 8334 - RNA, 22 nt, Artificial Sequence
  Synthesized RNAi sequence
uucauacugagcagguggugcu

SEQ ID NO: 8335 - RNA, 22 nt, Artificial Sequence
  Synthesized RNAi sequence
uucaucaaguucaaaagugaua

SEQ ID NO: 8336 - RNA, 22 nt, Artificial Sequence
  Synthesized RNAi sequence
uucaucacuaauaaauguacua

SEQ ID NO: 8337 - RNA, 22 nt, Artificial Sequence
  Synthesized RNAi sequence
uucauccucaucuggaggguag

SEQ ID NO: 8338 - RNA, 22 nt, Artificial Sequence
  Synthesized RNAi sequence
uucauuagguuucuuaauagua

SEQ ID NO: 8339 - RNA, 22 nt, Artificial Sequence
  Synthesized RNAi sequence
uucauuuagaucguuaagugug

SEQ ID NO: 8340 - RNA, 22 nt, Artificial Sequence
  Synthesized RNAi sequence
uuccaaagguuuaccuugguaa

SEQ ID NO: 8341 - RNA, 22 nt, Artificial Sequence
  Synthesized RNAi sequence
uuccaaauuuaagccauguguu

SEQ ID NO: 8342 - RNA, 22 nt, Artificial Sequence
  Synthesized RNAi sequence
uuccaagaaacaguuccaagaa

SEQ ID NO: 8343 - RNA, 22 nt, Artificial Sequence
  Synthesized RNAi sequence
uuccaagaauuucuugcuucuc

SEQ ID NO: 8344 - RNA, 22 nt, Artificial Sequence
  Synthesized RNAi sequence
uuccacacagacaggcauuaau

SEQ ID NO: 8345 - RNA, 22 nt, Artificial Sequence
  Synthesized RNAi sequence
uuccacuacuucuucagagacu

SEQ ID NO: 8346 - RNA, 22 nt, Artificial Sequence
  Synthesized RNAi sequence
uuccagaguuguuguaacuucu

SEQ ID NO: 8347 - RNA, 22 nt, Artificial Sequence
  Synthesized RNAi sequence
uuccauacauaauaaaaugaug

SEQ ID NO: 8348 - RNA, 22 nt, Artificial Sequence
  Synthesized RNAi sequence
uuccgcacuaucaccaacauca

SEQ ID NO: 8349 - RNA, 22 nt, Artificial Sequence
  Synthesized RNAi sequence
uuccucuuuaggaaucucagcg

SEQ ID NO: 8350 - RNA, 22 nt, Artificial Sequence
  Synthesized RNAi sequence
uucgacucuuguugcucuauua

SEQ ID NO: 8351 - RNA, 22 nt, Artificial Sequence
  Synthesized RNAi sequence
uucgcaggcaagauuauccauu

SEQ ID NO: 8352 - RNA, 22 nt, Artificial Sequence
  Synthesized RNAi sequence
uucgguaguuuucacauuacac

SEQ ID NO: 8353 - RNA, 22 nt, Artificial Sequence
  Synthesized RNAi sequence
uucguaguuguucagacaauga

SEQ ID NO: 8354 - RNA, 22 nt, Artificial Sequence
  Synthesized RNAi sequence
uucgugcugauuaaaauuuuca

SEQ ID NO: 8355 - RNA, 22 nt, Artificial Sequence
  Synthesized RNAi sequence
uucuaaagaaggauaggugucu

SEQ ID NO: 8356 - RNA, 22 nt, Artificial Sequence
  Synthesized RNAi sequence
uucuaacaccauuaacaauagu

SEQ ID NO: 8357 - RNA, 22 nt, Artificial Sequence
  Synthesized RNAi sequence
uucuaaccauagcugaaaucgg

SEQ ID NO: 8358 - RNA, 22 nt, Artificial Sequence
  Synthesized RNAi sequence
uucuacacccuuaaggguuguc

SEQ ID NO: 8359 - RNA, 22 nt, Artificial Sequence
  Synthesized RNAi sequence
uucuacaucugaaucaacaaac

SEQ ID NO: 8360 - RNA, 22 nt, Artificial Sequence
  Synthesized RNAi sequence
uucuagaauuuguacuucuagu

SEQ ID NO: 8361 - RNA, 22 nt, Artificial Sequence
  Synthesized RNAi sequence
uucuauaccuaguuguguagau

SEQ ID NO: 8362 - RNA, 22 nt, Artificial Sequence
  Synthesized RNAi sequence
uucuaucacagugucaucacca

SEQ ID NO: 8363 - RNA, 22 nt, Artificial Sequence
  Synthesized RNAi sequence
uucuaugucagauugaugugac

SEQ ID NO: 8364 - RNA, 22 nt, Artificial Sequence
  Synthesized RNAi sequence
uucucaaagcuuucgcuagcau

SEQ ID NO: 8365 - RNA, 22 nt, Artificial Sequence
  Synthesized RNAi sequence
uucucauuaaguacuuuaucaa

SEQ ID NO: 8366 - RNA, 22 nt, Artificial Sequence
  Synthesized RNAi sequence
uucucauuagagauaauagaug

SEQ ID NO: 8367 - RNA, 22 nt, Artificial Sequence
  Synthesized RNAi sequence
uucucgcaaauuccaagaaaca

SEQ ID NO: 8368 - RNA, 22 nt, Artificial Sequence
  Synthesized RNAi sequence
uucucuaacaucaccuaacuca

SEQ ID NO: 8369 - RNA, 22 nt, Artificial Sequence
  Synthesized RNAi sequence
uucucucaaagaaagaaguguc

SEQ ID NO: 8370 - RNA, 22 nt, Artificial Sequence
  Synthesized RNAi sequence
uucucuguaaccaguacaguaa

SEQ ID NO: 8371 - RNA, 22 nt, Artificial Sequence
  Synthesized RNAi sequence
uucucuguucaacugaagguuu

SEQ ID NO: 8372 - RNA, 22 nt, Artificial Sequence
  Synthesized RNAi sequence
uucugaggacuuuguaaguaaa

SEQ ID NO: 8373 - RNA, 22 nt, Artificial Sequence
  Synthesized RNAi sequence
uucuguaccgaguucaacugua

SEQ ID NO: 8374 - RNA, 22 nt, Artificial Sequence
  Synthesized RNAi sequence
uucuguaugguaggauuuucca

SEQ ID NO: 8375 - RNA, 22 nt, Artificial Sequence
  Synthesized RNAi sequence
uucugugaggaacuuaguuucu

SEQ ID NO: 8376 - RNA, 22 nt, Artificial Sequence
  Synthesized RNAi sequence
uucuuaaaagaggguguguagu

SEQ ID NO: 8377 - RNA, 22 nt, Artificial Sequence
  Synthesized RNAi sequence
uucuuaaauuguucauaagaaa

SEQ ID NO: 8378 - RNA, 22 nt, Artificial Sequence
  Synthesized RNAi sequence
uucuuaauaguaagacuagaau

SEQ ID NO: 8379 - RNA, 22 nt, Artificial Sequence
  Synthesized RNAi sequence
uucuuauaaccaguuaacuggu

SEQ ID NO: 8380 - RNA, 22 nt, Artificial Sequence
  Synthesized RNAi sequence
uucuuaucaucuuguuuucucu

SEQ ID NO: 8381 - RNA, 22 nt, Artificial Sequence
  Synthesized RNAi sequence
uucuucaacacaagcuuugauu

SEQ ID NO: 8382 - RNA, 22 nt, Artificial Sequence
  Synthesized RNAi sequence
uucuucacuguaacacuaucaa

SEQ ID NO: 8383 - RNA, 22 nt, Artificial Sequence
  Synthesized RNAi sequence
uucuucagguguuuuagaagaa

SEQ ID NO: 8384 - RNA, 22 nt, Artificial Sequence
  Synthesized RNAi sequence
uucuucagguugaagagcagca

SEQ ID NO: 8385 - RNA, 22 nt, Artificial Sequence
  Synthesized RNAi sequence
uucuucauccucaucuggaggg

SEQ ID NO: 8386 - RNA, 22 nt, Artificial Sequence
  Synthesized RNAi sequence
uucuuccaaauuuaagccaugu

SEQ ID NO: 8387 - RNA, 22 nt, Artificial Sequence
  Synthesized RNAi sequence
uucuuccagaguuguuguaacu

SEQ ID NO: 8388 - RNA, 22 nt, Artificial Sequence
  Synthesized RNAi sequence
uucuucugcaugugcaagcauu

SEQ ID NO: 8389 - RNA, 22 nt, Artificial Sequence
  Synthesized RNAi sequence
uucuucuucacaaucaccuucu

SEQ ID NO: 8390 - RNA, 22 nt, Artificial Sequence
  Synthesized RNAi sequence
uucuugcuucucauuagagaua

SEQ ID NO: 8391 - RNA, 22 nt, Artificial Sequence
  Synthesized RNAi sequence
uucuuuaagaaagugaugucaa

SEQ ID NO: 8392 - RNA, 22 nt, Artificial Sequence
  Synthesized RNAi sequence
uucuuuagaaguuauauguuua

SEQ ID NO: 8393 - RNA, 22 nt, Artificial Sequence
  Synthesized RNAi sequence
uucuuugcaaguucagcuucug

SEQ ID NO: 8394 - RNA, 22 nt, Artificial Sequence
  Synthesized RNAi sequence
uucuuugcuauaguagucggca

SEQ ID NO: 8395 - RNA, 22 nt, Artificial Sequence
  Synthesized RNAi sequence
uucuuuguagaaaacauccgua

SEQ ID NO: 8396 - RNA, 22 nt, Artificial Sequence
  Synthesized RNAi sequence
uugaaacaaguaacucauuguu

SEQ ID NO: 8397 - RNA, 22 nt, Artificial Sequence
  Synthesized RNAi sequence
uugaaacuauggcuuuaguuuc

SEQ ID NO: 8398 - RNA, 22 nt, Artificial Sequence
  Synthesized RNAi sequence
uugaacaacaucacccacuaua

SEQ ID NO: 8399 - RNA, 22 nt, Artificial Sequence
  Synthesized RNAi sequence
uugaagagcagcagaaguggca

SEQ ID NO: 8400 - RNA, 22 nt, Artificial Sequence
  Synthesized RNAi sequence
uugaagcagguuucuuauaacc

SEQ ID NO: 8401 - RNA, 22 nt, Artificial Sequence
  Synthesized RNAi sequence
uugaaugucuucaccuuuguua

SEQ ID NO: 8402 - RNA, 22 nt, Artificial Sequence
  Synthesized RNAi sequence
uugacacauaagcugacuguag

SEQ ID NO: 8403 - RNA, 22 nt, Artificial Sequence
  Synthesized RNAi sequence
uugacauguccacaacuugcgu

SEQ ID NO: 8404 - RNA, 22 nt, Artificial Sequence
  Synthesized RNAi sequence
uugaccaacaguuuguugacua

SEQ ID NO: 8405 - RNA, 22 nt, Artificial Sequence
  Synthesized RNAi sequence
uugaccagcuuuaucaaaguaa

SEQ ID NO: 8406 - RNA, 22 nt, Artificial Sequence
  Synthesized RNAi sequence
uugacuaucaucaucuaaccaa

SEQ ID NO: 8407 - RNA, 22 nt, Artificial Sequence
  Synthesized RNAi sequence
uugagagaucucauauaccgag

SEQ ID NO: 8408 - RNA, 22 nt, Artificial Sequence
  Synthesized RNAi sequence
uugaguagauuaaagaaccuag

SEQ ID NO: 8409 - RNA, 22 nt, Artificial Sequence
  Synthesized RNAi sequence
uugaguugauggcucaaacucu

SEQ ID NO: 8410 - RNA, 22 nt, Artificial Sequence
  Synthesized RNAi sequence
uugauaagugacgcuacaguug

SEQ ID NO: 8411 - RNA, 22 nt, Artificial Sequence
  Synthesized RNAi sequence
uugauauuaucacauacaaacu

SEQ ID NO: 8412 - RNA, 22 nt, Artificial Sequence
  Synthesized RNAi sequence
uugaugaaaacguauuaacgua

SEQ ID NO: 8413 - RNA, 22 nt, Artificial Sequence
  Synthesized RNAi sequence
uugaugaauuacaaccgucuac

SEQ ID NO: 8414 - RNA, 22 nt, Artificial Sequence
  Synthesized RNAi sequence
uugauggcucaaacucuucuuc

SEQ ID NO: 8415 - RNA, 22 nt, Artificial Sequence
  Synthesized RNAi sequence
uugaugugacaauuuaagacau

SEQ ID NO: 8416 - RNA, 22 nt, Artificial Sequence
  Synthesized RNAi sequence
uugauguuucaacugguuuugu

SEQ ID NO: 8417 - RNA, 22 nt, Artificial Sequence
  Synthesized RNAi sequence
uugauuuucuuaucaucuuguu

SEQ ID NO: 8418 - RNA, 22 nt, Artificial Sequence
  Synthesized RNAi sequence
uugcaagaaucuaaauuggcau

SEQ ID NO: 8419 - RNA, 22 nt, Artificial Sequence
  Synthesized RNAi sequence
uugcaauagugacauuaguaga

SEQ ID NO: 8420 - RNA, 22 nt, Artificial Sequence
  Synthesized RNAi sequence
uugcacaugucaacuuaaaagg

SEQ ID NO: 8421 - RNA, 22 nt, Artificial Sequence
  Synthesized RNAi sequence
uugcacuucuaucacaguguca

SEQ ID NO: 8422 - RNA, 22 nt, Artificial Sequence
  Synthesized RNAi sequence
uugcagaugauucuucacauuu

SEQ ID NO: 8423 - RNA, 22 nt, Artificial Sequence
  Synthesized RNAi sequence
uugcauggcauuguuaguagcc

SEQ ID NO: 8424 - RNA, 22 nt, Artificial Sequence
  Synthesized RNAi sequence
uugcauuguuaacaugccaaac

SEQ ID NO: 8425 - RNA, 22 nt, Artificial Sequence
  Synthesized RNAi sequence
uugccauuaaugucaauauaaa

SEQ ID NO: 8426 - RNA, 22 nt, Artificial Sequence
  Synthesized RNAi sequence
uugccgagcugcugaaauaaaa

SEQ ID NO: 8427 - RNA, 22 nt, Artificial Sequence
  Synthesized RNAi sequence
uugccuccucuacaguguaacc

SEQ ID NO: 8428 - RNA, 22 nt, Artificial Sequence
  Synthesized RNAi sequence
uugcguguggagguuaauguug

SEQ ID NO: 8429 - RNA, 22 nt, Artificial Sequence
  Synthesized RNAi sequence
uugcguguuucuucugcaugug

SEQ ID NO: 8430 - RNA, 22 nt, Artificial Sequence
  Synthesized RNAi sequence
uugcguuuggauaugguugguu

SEQ ID NO: 8431 - RNA, 22 nt, Artificial Sequence
  Synthesized RNAi sequence
uugcuauaguagucggcauaga

SEQ ID NO: 8432 - RNA, 22 nt, Artificial Sequence
  Synthesized RNAi sequence
uugcucuauuacguuuguaaca

SEQ ID NO: 8433 - RNA, 22 nt, Artificial Sequence
  Synthesized RNAi sequence
uugcucuguaauaagcaucuug

SEQ ID NO: 8434 - RNA, 22 nt, Artificial Sequence
  Synthesized RNAi sequence
uugcucuucuucagguugaaga

SEQ ID NO: 8435 - RNA, 22 nt, Artificial Sequence
  Synthesized RNAi sequence
uugcugguuuaaguauaauguc

SEQ ID NO: 8436 - RNA, 22 nt, Artificial Sequence
  Synthesized RNAi sequence
uugcuucucauuagagauaaua

SEQ ID NO: 8437 - RNA, 22 nt, Artificial Sequence
  Synthesized RNAi sequence
uuggaccaaacuguuguccaua

SEQ ID NO: 8438 - RNA, 22 nt, Artificial Sequence
  Synthesized RNAi sequence
uuggaguguuaacaaugcagug

SEQ ID NO: 8439 - RNA, 22 nt, Artificial Sequence
  Synthesized RNAi sequence
uuggcacuuuucucaaagcuuu

SEQ ID NO: 8440 - RNA, 22 nt, Artificial Sequence
  Synthesized RNAi sequence
uuggcauguugaaacaaguaac

SEQ ID NO: 8441 - RNA, 22 nt, Artificial Sequence
  Synthesized RNAi sequence
uuggcugcauuaacaaccacug

SEQ ID NO: 8442 - RNA, 22 nt, Artificial Sequence
  Synthesized RNAi sequence
uugggccgacaacaugaagaca

SEQ ID NO: 8443 - RNA, 22 nt, Artificial Sequence
  Synthesized RNAi sequence
uugguaaucaucuucaguacca

SEQ ID NO: 8444 - RNA, 22 nt, Artificial Sequence
  Synthesized RNAi sequence
uuggucuuuuaaacuguaguga

SEQ ID NO: 8445 - RNA, 22 nt, Artificial Sequence
  Synthesized RNAi sequence
uugguuuauacguggcuuuauu

SEQ ID NO: 8446 - RNA, 22 nt, Artificial Sequence
  Synthesized RNAi sequence
uuguaaacaccuuaauaguccu

SEQ ID NO: 8447 - RNA, 22 nt, Artificial Sequence
  Synthesized RNAi sequence
uuguaacaagaguuucauuuag

SEQ ID NO: 8448 - RNA, 22 nt, Artificial Sequence
  Synthesized RNAi sequence
uuguaacacaucauacaaguug

SEQ ID NO: 8449 - RNA, 22 nt, Artificial Sequence
  Synthesized RNAi sequence
uuguaaccuugcacuucuauca

SEQ ID NO: 8450 - RNA, 22 nt, Artificial Sequence
  Synthesized RNAi sequence
uuguaacuucuucaacacaagc

SEQ ID NO: 8451 - RNA, 22 nt, Artificial Sequence
  Synthesized RNAi sequence
uuguaaguaaagcaccgucuau

SEQ ID NO: 8452 - RNA, 22 nt, Artificial Sequence
  Synthesized RNAi sequence
uuguacaagauuaauuauuaac

SEQ ID NO: 8453 - RNA, 22 nt, Artificial Sequence
  Synthesized RNAi sequence
uuguacauucgacucuuguugc

SEQ ID NO: 8454 - RNA, 22 nt, Artificial Sequence
  Synthesized RNAi sequence
uuguacuaacaacuuuguuaag

SEQ ID NO: 8455 - RNA, 22 nt, Artificial Sequence
  Synthesized RNAi sequence
uuguacuagauauuuuguagcu

SEQ ID NO: 8456 - RNA, 22 nt, Artificial Sequence
  Synthesized RNAi sequence
uuguagaaaacauccguaauag

SEQ ID NO: 8457 - RNA, 22 nt, Artificial Sequence
  Synthesized RNAi sequence
uuguagagcagguggauuaaac

SEQ ID NO: 8458 - RNA, 22 nt, Artificial Sequence
  Synthesized RNAi sequence
uuguagcuuguuuaccacacgu

SEQ ID NO: 8459 - RNA, 22 nt, Artificial Sequence
  Synthesized RNAi sequence
uuguauaguuucuaaagaagga

SEQ ID NO: 8460 - RNA, 22 nt, Artificial Sequence
  Synthesized RNAi sequence
uuguauucugaggacuuuguaa

SEQ ID NO: 8461 - RNA, 22 nt, Artificial Sequence
  Synthesized RNAi sequence
uuguauuuuaauacccuuauau

SEQ ID NO: 8462 - RNA, 22 nt, Artificial Sequence
  Synthesized RNAi sequence
uugucaaaggugauaacuucac

SEQ ID NO: 8463 - RNA, 22 nt, Artificial Sequence
  Synthesized RNAi sequence
uugucaguaaguuuuaaauaac

SEQ ID NO: 8464 - RNA, 22 nt, Artificial Sequence
  Synthesized RNAi sequence
uuguccacaaguuuuacacacc

SEQ ID NO: 8465 - RNA, 22 nt, Artificial Sequence
  Synthesized RNAi sequence
uuguccagaauaggaccaaucu

SEQ ID NO: 8466 - RNA, 22 nt, Artificial Sequence
  Synthesized RNAi sequence
uuguccauaugucauugacaug

SEQ ID NO: 8467 - RNA, 22 nt, Artificial Sequence
  Synthesized RNAi sequence
uuguccucacugccgucuuguu

SEQ ID NO: 8468 - RNA, 22 nt, Artificial Sequence
  Synthesized RNAi sequence
uugucuaaggacacauucuuug

SEQ ID NO: 8469 - RNA, 22 nt, Artificial Sequence
  Synthesized RNAi sequence
uugucuaaguuaacaaaaugag

SEQ ID NO: 8470 - RNA, 22 nt, Artificial Sequence
  Synthesized RNAi sequence
uugucuacauaagcagccauua

SEQ ID NO: 8471 - RNA, 22 nt, Artificial Sequence
  Synthesized RNAi sequence
uugucuacuguuguaaacaccu

SEQ ID NO: 8472 - RNA, 22 nt, Artificial Sequence
  Synthesized RNAi sequence
uugucuaguaguugcacauguc

SEQ ID NO: 8473 - RNA, 22 nt, Artificial Sequence
  Synthesized RNAi sequence
uugucugcuguuguccacaagu

SEQ ID NO: 8474 - RNA, 22 nt, Artificial Sequence
  Synthesized RNAi sequence
uugucuguuggcacuuuucuca

SEQ ID NO: 8475 - RNA, 22 nt, Artificial Sequence
  Synthesized RNAi sequence
uugugcgaacaguaucuacaca

SEQ ID NO: 8476 - RNA, 22 nt, Artificial Sequence
  Synthesized RNAi sequence
uugugcuccaaagacaacguau

SEQ ID NO: 8477 - RNA, 22 nt, Artificial Sequence
  Synthesized RNAi sequence
uuguguaacuguuuucuuugua

SEQ ID NO: 8478 - RNA, 22 nt, Artificial Sequence
  Synthesized RNAi sequence
uuguguccgcuuaaaacacaac

SEQ ID NO: 8479 - RNA, 22 nt, Artificial Sequence
  Synthesized RNAi sequence
uugugugguaguacucaaaagc

SEQ ID NO: 8480 - RNA, 22 nt, Artificial Sequence
  Synthesized RNAi sequence
uuguuaacaugccaaacaauag

SEQ ID NO: 8481 - RNA, 22 nt, Artificial Sequence
  Synthesized RNAi sequence
uuguuaacauuugggccgacaa

SEQ ID NO: 8482 - RNA, 22 nt, Artificial Sequence
  Synthesized RNAi sequence
uuguuaagaaaaggcuuagcau

SEQ ID NO: 8483 - RNA, 22 nt, Artificial Sequence
  Synthesized RNAi sequence
uuguuacaacauuaacaacuug

SEQ ID NO: 8484 - RNA, 22 nt, Artificial Sequence
  Synthesized RNAi sequence
uuguuaguagccuuauuuaagg

SEQ ID NO: 8485 - RNA, 22 nt, Artificial Sequence
  Synthesized RNAi sequence
uuguuauaggugagcauauagu

SEQ ID NO: 8486 - RNA, 22 nt, Artificial Sequence
  Synthesized RNAi sequence
uuguuaucugcccauuuaauag

SEQ ID NO: 8487 - RNA, 22 nt, Artificial Sequence
  Synthesized RNAi sequence
uuguucagacaaugacaugaaa

SEQ ID NO: 8488 - RNA, 22 nt, Artificial Sequence
  Synthesized RNAi sequence
uuguucauaagaaagugugccc

SEQ ID NO: 8489 - RNA, 22 nt, Artificial Sequence
  Synthesized RNAi sequence
uuguugaccaacaguuuguuga

SEQ ID NO: 8490 - RNA, 22 nt, Artificial Sequence
  Synthesized RNAi sequence
uuguugacuaucaucaucuaac

SEQ ID NO: 8491 - RNA, 22 nt, Artificial Sequence
  Synthesized RNAi sequence
uuguugcucuauuacguuugua

SEQ ID NO: 8492 - RNA, 22 nt, Artificial Sequence
  Synthesized RNAi sequence
uuguuggaguguuaacaaugca

SEQ ID NO: 8493 - RNA, 22 nt, Artificial Sequence
  Synthesized RNAi sequence
uuguuguaacuucuucaacaca

SEQ ID NO: 8494 - RNA, 22 nt, Artificial Sequence
  Synthesized RNAi sequence
uuguuguguaacuguuuucuuu

SEQ ID NO: 8495 - RNA, 22 nt, Artificial Sequence
  Synthesized RNAi sequence
uuguuguuacaacauuaacaac

SEQ ID NO: 8496 - RNA, 22 nt, Artificial Sequence
  Synthesized RNAi sequence
uuguuuaccacacguacaaggu

SEQ ID NO: 8497 - RNA, 22 nt, Artificial Sequence
  Synthesized RNAi sequence
uuguuucucuaacaucaccuaa

SEQ ID NO: 8498 - RNA, 22 nt, Artificial Sequence
  Synthesized RNAi sequence
uuguuuuacugguguaaaagua

SEQ ID NO: 8499 - RNA, 22 nt, Artificial Sequence
  Synthesized RNAi sequence
uuguuuucguaguuguucagac

SEQ ID NO: 8500 - RNA, 22 nt, Artificial Sequence
  Synthesized RNAi sequence
uuguuuucucuguucaacugaa

SEQ ID NO: 8501 - RNA, 22 nt, Artificial Sequence
  Synthesized RNAi sequence
uuuaaaagaugaaaugguaauu

SEQ ID NO: 8502 - RNA, 22 nt, Artificial Sequence
  Synthesized RNAi sequence
uuuaaacaccguguaacuaugu

SEQ ID NO: 8503 - RNA, 22 nt, Artificial Sequence
  Synthesized RNAi sequence
uuuaaacccugacccggguaag

SEQ ID NO: 8504 - RNA, 22 nt, Artificial Sequence
  Synthesized RNAi sequence
uuuaaacucaccagacucauca

SEQ ID NO: 8505 - RNA, 22 nt, Artificial Sequence
  Synthesized RNAi sequence
uuuaaacuguagugacaagucu

SEQ ID NO: 8506 - RNA, 22 nt, Artificial Sequence
  Synthesized RNAi sequence
uuuaaauaaccacuaaaacuau

SEQ ID NO: 8507 - RNA, 22 nt, Artificial Sequence
  Synthesized RNAi sequence
uuuaacguuccauaucaaagca

SEQ ID NO: 8508 - RNA, 22 nt, Artificial Sequence
  Synthesized RNAi sequence
uuuaacugcaacuuccgcacua

SEQ ID NO: 8509 - RNA, 22 nt, Artificial Sequence
  Synthesized RNAi sequence
uuuaagaaagugaugucaaugu

SEQ ID NO: 8510 - RNA, 22 nt, Artificial Sequence
  Synthesized RNAi sequence
uuuaagacauucaacaacaucu

SEQ ID NO: 8511 - RNA, 22 nt, Artificial Sequence
  Synthesized RNAi sequence
uuuaagccauguguuacauagc

SEQ ID NO: 8512 - RNA, 22 nt, Artificial Sequence
  Synthesized RNAi sequence
uuuaaggcuccugcaacaccuc

SEQ ID NO: 8513 - RNA, 22 nt, Artificial Sequence
  Synthesized RNAi sequence
uuuaagguaaacauuggcugca

SEQ ID NO: 8514 - RNA, 22 nt, Artificial Sequence
  Synthesized RNAi sequence
uuuaaguauaaugucuccuaca

SEQ ID NO: 8515 - RNA, 22 nt, Artificial Sequence
  Synthesized RNAi sequence
uuuaagugguccauuaguagcu

SEQ ID NO: 8516 - RNA, 22 nt, Artificial Sequence
  Synthesized RNAi sequence
uuuaauacccuuauauuuacgc

SEQ ID NO: 8517 - RNA, 22 nt, Artificial Sequence
  Synthesized RNAi sequence
uuuaauagaaguuaaaccauua

SEQ ID NO: 8518 - RNA, 22 nt, Artificial Sequence
  Synthesized RNAi sequence
uuuaauucuagaauuuguacuu

SEQ ID NO: 8519 - RNA, 22 nt, Artificial Sequence
  Synthesized RNAi sequence
uuuacacaccacguucaagacu

SEQ ID NO: 8520 - RNA, 22 nt, Artificial Sequence
  Synthesized RNAi sequence
uuuaccacacguacaagguauc

SEQ ID NO: 8521 - RNA, 22 nt, Artificial Sequence
  Synthesized RNAi sequence
uuuaccacccuuaagugcuauc

SEQ ID NO: 8522 - RNA, 22 nt, Artificial Sequence
  Synthesized RNAi sequence
uuuaccgacacucuuaacagua

SEQ ID NO: 8523 - RNA, 22 nt, Artificial Sequence
  Synthesized RNAi sequence
uuuaccuccauuagcauagaca

SEQ ID NO: 8524 - RNA, 22 nt, Artificial Sequence
  Synthesized RNAi sequence
uuuaccuucaugugaauuauga

SEQ ID NO: 8525 - RNA, 22 nt, Artificial Sequence
  Synthesized RNAi sequence
uuuaccuugguaaucaucuuca

SEQ ID NO: 8526 - RNA, 22 nt, Artificial Sequence
  Synthesized RNAi sequence
uuuacgcuguauaguugaaacu

SEQ ID NO: 8527 - RNA, 22 nt, Artificial Sequence
  Synthesized RNAi sequence
uuuacugguguaaaaguaaaau

SEQ ID NO: 8528 - RNA, 22 nt, Artificial Sequence
  Synthesized RNAi sequence
uuuacuucuguaccgaguucaa

SEQ ID NO: 8529 - RNA, 22 nt, Artificial Sequence
  Synthesized RNAi sequence
uuuagaagaagaaguaagauaa

SEQ ID NO: 8530 - RNA, 22 nt, Artificial Sequence
  Synthesized RNAi sequence
uuuagaaguuauauguuuauag

SEQ ID NO: 8531 - RNA, 22 nt, Artificial Sequence
  Synthesized RNAi sequence
uuuagaucguuaaguguguuga

SEQ ID NO: 8532 - RNA, 22 nt, Artificial Sequence
  Synthesized RNAi sequence
uuuagaucuucgcaggcaagau

SEQ ID NO: 8533 - RNA, 22 nt, Artificial Sequence
  Synthesized RNAi sequence
uuuagcaagauuguguccgcuu

SEQ ID NO: 8534 - RNA, 22 nt, Artificial Sequence
  Synthesized RNAi sequence
uuuaggaaucucagcgaucuuu

SEQ ID NO: 8535 - RNA, 22 nt, Artificial Sequence
  Synthesized RNAi sequence
uuuaguaacaucagcuccaucc

SEQ ID NO: 8536 - RNA, 22 nt, Artificial Sequence
  Synthesized RNAi sequence
uuuaguguuauuagcucucagg

SEQ ID NO: 8537 - RNA, 22 nt, Artificial Sequence
  Synthesized RNAi sequence
uuuaguuuccacacagacaggc

SEQ ID NO: 8538 - RNA, 22 nt, Artificial Sequence
  Synthesized RNAi sequence
uuuaguuucuacaucugaauca

SEQ ID NO: 8539 - RNA, 22 nt, Artificial Sequence
  Synthesized RNAi sequence
uuuauaaguaacugguuuuaug

SEQ ID NO: 8540 - RNA, 22 nt, Artificial Sequence
  Synthesized RNAi sequence
uuuauaaucaauagccaccaca

SEQ ID NO: 8541 - RNA, 22 nt, Artificial Sequence
  Synthesized RNAi sequence
uuuauacguggcuuuauuaguu

SEQ ID NO: 8542 - RNA, 22 nt, Artificial Sequence
  Synthesized RNAi sequence
uuuauaggaaccagcaagugag

SEQ ID NO: 8543 - RNA, 22 nt, Artificial Sequence
  Synthesized RNAi sequence
uuuauagugaccacacugguaa

SEQ ID NO: 8544 - RNA, 22 nt, Artificial Sequence
  Synthesized RNAi sequence
uuuaucaauccuuucaucaagu

SEQ ID NO: 8545 - RNA, 22 nt, Artificial Sequence
  Synthesized RNAi sequence
uuuaucaccucucuuaagaaau

SEQ ID NO: 8546 - RNA, 22 nt, Artificial Sequence
  Synthesized RNAi sequence
uuuaugguuguuguguaacugu

SEQ ID NO: 8547 - RNA, 22 nt, Artificial Sequence
  Synthesized RNAi sequence
uuuauguaacaauuuagcuccu

SEQ ID NO: 8548 - RNA, 22 nt, Artificial Sequence
  Synthesized RNAi sequence
uuuauuaguugcauuguuaaca

SEQ ID NO: 8549 - RNA, 22 nt, Artificial Sequence
  Synthesized RNAi sequence
uuuauuggucuuuuaaacugua

SEQ ID NO: 8550 - RNA, 22 nt, Artificial Sequence
  Synthesized RNAi sequence
uuuauuuuaguaacaucagcuc

SEQ ID NO: 8551 - RNA, 22 nt, Artificial Sequence
  Synthesized RNAi sequence
uuucaacugguuuugugcucca

SEQ ID NO: 8552 - RNA, 22 nt, Artificial Sequence
  Synthesized RNAi sequence
uuucaacuuuguuauaggugag

SEQ ID NO: 8553 - RNA, 22 nt, Artificial Sequence
  Synthesized RNAi sequence
uuucaauaaaauguucuucagg

SEQ ID NO: 8554 - RNA, 22 nt, Artificial Sequence
  Synthesized RNAi sequence
uuucacauuacacucaagaacg

SEQ ID NO: 8555 - RNA, 22 nt, Artificial Sequence
  Synthesized RNAi sequence
uuucaguuauaaauggcuuaac

SEQ ID NO: 8556 - RNA, 22 nt, Artificial Sequence
  Synthesized RNAi sequence
uuucauaagcacucuuaagaag

SEQ ID NO: 8557 - RNA, 22 nt, Artificial Sequence
  Synthesized RNAi sequence
uuucauaagucuuuugaccagc

SEQ ID NO: 8558 - RNA, 22 nt, Artificial Sequence
  Synthesized RNAi sequence
uuucaucaaguucaaaagugau

SEQ ID NO: 8559 - RNA, 22 nt, Artificial Sequence
  Synthesized RNAi sequence
uuucauuuagaucguuaagugu

SEQ ID NO: 8560 - RNA, 22 nt, Artificial Sequence
  Synthesized RNAi sequence
uuuccacacagacaggcauuaa

SEQ ID NO: 8561 - RNA, 22 nt, Artificial Sequence
  Synthesized RNAi sequence
uuuccacuacuucuucagagac

SEQ ID NO: 8562 - RNA, 22 nt, Artificial Sequence
  Synthesized RNAi sequence
uuuccauacauaauaaaaugau

SEQ ID NO: 8563 - RNA, 22 nt, Artificial Sequence
  Synthesized RNAi sequence
uuucguaguuguucagacaaug

SEQ ID NO: 8564 - RNA, 22 nt, Artificial Sequence
  Synthesized RNAi sequence
uuucuaaagaaggauagguguc

SEQ ID NO: 8565 - RNA, 22 nt, Artificial Sequence
  Synthesized RNAi sequence
uuucuacaucugaaucaacaaa

SEQ ID NO: 8566 - RNA, 22 nt, Artificial Sequence
  Synthesized RNAi sequence
uuucucaaagcuuucgcuagca

SEQ ID NO: 8567 - RNA, 22 nt, Artificial Sequence
  Synthesized RNAi sequence
uuucucgcaaauuccaagaaac

SEQ ID NO: 8568 - RNA, 22 nt, Artificial Sequence
  Synthesized RNAi sequence
uuucucuguucaacugaagguu

SEQ ID NO: 8569 - RNA, 22 nt, Artificial Sequence
  Synthesized RNAi sequence
uuucuguacaaacaacaccauc

SEQ ID NO: 8570 - RNA, 22 nt, Artificial Sequence
  Synthesized RNAi sequence
uuucuguaugguaggauuuucc

SEQ ID NO: 8571 - RNA, 22 nt, Artificial Sequence
  Synthesized RNAi sequence
uuucuuaaaagaggguguguag

SEQ ID NO: 8572 - RNA, 22 nt, Artificial Sequence
  Synthesized RNAi sequence
uuucuuaaauuguucauaagaa

SEQ ID NO: 8573 - RNA, 22 nt, Artificial Sequence
  Synthesized RNAi sequence
uuucuuaauaguaagacuagaa

SEQ ID NO: 8574 - RNA, 22 nt, Artificial Sequence
  Synthesized RNAi sequence
uuucuuauaaccaguuaacugg

SEQ ID NO: 8575 - RNA, 22 nt, Artificial Sequence
  Synthesized RNAi sequence
uuucuuaucaucuuguuuucuc

SEQ ID NO: 8576 - RNA, 22 nt, Artificial Sequence
  Synthesized RNAi sequence
uuucuuccagaguuguuguaac

SEQ ID NO: 8577 - RNA, 22 nt, Artificial Sequence
  Synthesized RNAi sequence
uuucuucugcaugugcaagcau

SEQ ID NO: 8578 - RNA, 22 nt, Artificial Sequence
  Synthesized RNAi sequence
uuucuugcuucucauuagagau

SEQ ID NO: 8579 - RNA, 22 nt, Artificial Sequence
  Synthesized RNAi sequence
uuucuuuaagaaagugauguca

SEQ ID NO: 8580 - RNA, 22 nt, Artificial Sequence
  Synthesized RNAi sequence
uuucuuuguagaaaacauccgu

SEQ ID NO: 8581 - RNA, 22 nt, Artificial Sequence
  Synthesized RNAi sequence
uuugaccagcuuuaucaaagua

SEQ ID NO: 8582 - RNA, 22 nt, Artificial Sequence
  Synthesized RNAi sequence
uuugagagaucucauauaccga

SEQ ID NO: 8583 - RNA, 22 nt, Artificial Sequence
  Synthesized RNAi sequence
uuugauauuaucacauacaaac

SEQ ID NO: 8584 - RNA, 22 nt, Artificial Sequence
  Synthesized RNAi sequence
uuugauuuucuuaucaucuugu

SEQ ID NO: 8585 - RNA, 22 nt, Artificial Sequence
  Synthesized RNAi sequence
uuugcaagaaucuaaauuggca

SEQ ID NO: 8586 - RNA, 22 nt, Artificial Sequence
  Synthesized RNAi sequence
uuugcaaguucagcuucugcag

SEQ ID NO: 8587 - RNA, 22 nt, Artificial Sequence
  Synthesized RNAi sequence
uuugcagaugauucuucacauu

SEQ ID NO: 8588 - RNA, 22 nt, Artificial Sequence
  Synthesized RNAi sequence
uuugccuccucuacaguguaac

SEQ ID NO: 8589 - RNA, 22 nt, Artificial Sequence
  Synthesized RNAi sequence
uuugcguguuucuucugcaugu

SEQ ID NO: 8590 - RNA, 22 nt, Artificial Sequence
  Synthesized RNAi sequence
uuugcuauaguagucggcauag

SEQ ID NO: 8591 - RNA, 22 nt, Artificial Sequence
  Synthesized RNAi sequence
uuugguuuauacguggcuuuau

SEQ ID NO: 8592 - RNA, 22 nt, Artificial Sequence
  Synthesized RNAi sequence
uuuguaacacaucauacaaguu

SEQ ID NO: 8593 - RNA, 22 nt, Artificial Sequence
  Synthesized RNAi sequence
uuuguaaguaaagcaccgucua

SEQ ID NO: 8594 - RNA, 22 nt, Artificial Sequence
  Synthesized RNAi sequence
uuuguagaaaacauccguaaua

SEQ ID NO: 8595 - RNA, 22 nt, Artificial Sequence
  Synthesized RNAi sequence
uuuguagcuuguuuaccacacg

SEQ ID NO: 8596 - RNA, 22 nt, Artificial Sequence
  Synthesized RNAi sequence
uuuguauaguuucuaaagaagg

SEQ ID NO: 8597 - RNA, 22 nt, Artificial Sequence
  Synthesized RNAi sequence
uuuguauucugaggacuuugua

SEQ ID NO: 8598 - RNA, 22 nt, Artificial Sequence
  Synthesized RNAi sequence
uuugugcgaacaguaucuacac

SEQ ID NO: 8599 - RNA, 22 nt, Artificial Sequence
  Synthesized RNAi sequence
uuugugcuccaaagacaacgua

SEQ ID NO: 8600 - RNA, 22 nt, Artificial Sequence
  Synthesized RNAi sequence
uuuguuaacauuugggccgaca

SEQ ID NO: 8601 - RNA, 22 nt, Artificial Sequence
  Synthesized RNAi sequence
uuuguuaagaaaaggcuuagca

SEQ ID NO: 8602 - RNA, 22 nt, Artificial Sequence
  Synthesized RNAi sequence
uuuguuauaggugagcauauag

SEQ ID NO: 8603 - RNA, 22 nt, Artificial Sequence
  Synthesized RNAi sequence
uuuguugacuaucaucaucuaa

SEQ ID NO: 8604 - RNA, 22 nt, Artificial Sequence
  Synthesized RNAi sequence
uuuguuggaguguuaacaaugc

SEQ ID NO: 8605 - RNA, 22 nt, Artificial Sequence
  Synthesized RNAi sequence
uuuguuguuacaacauuaacaa

SEQ ID NO: 8606 - RNA, 22 nt, Artificial Sequence
  Synthesized RNAi sequence
uuuguuuucguaguuguucaga

SEQ ID NO: 8607 - RNA, 22 nt, Artificial Sequence
  Synthesized RNAi sequence
uuuuaaacuguagugacaaguc

SEQ ID NO: 8608 - RNA, 22 nt, Artificial Sequence
  Synthesized RNAi sequence
uuuuaaauaaccacuaaaacua

SEQ ID NO: 8609 - RNA, 22 nt, Artificial Sequence
  Synthesized RNAi sequence
uuuuaacugcaacuuccgcacu

SEQ ID NO: 8610 - RNA, 22 nt, Artificial Sequence
  Synthesized RNAi sequence
uuuuaauacccuuauauuuacg

SEQ ID NO: 8611 - RNA, 22 nt, Artificial Sequence
  Synthesized RNAi sequence
uuuuacacaccacguucaagac

SEQ ID NO: 8612 - RNA, 22 nt, Artificial Sequence
  Synthesized RNAi sequence
uuuuaccacccuuaagugcuau

SEQ ID NO: 8613 - RNA, 22 nt, Artificial Sequence
  Synthesized RNAi sequence
uuuuaccuucaugugaauuaug

SEQ ID NO: 8614 - RNA, 22 nt, Artificial Sequence
  Synthesized RNAi sequence
uuuuacugguguaaaaguaaaa

SEQ ID NO: 8615 - RNA, 22 nt, Artificial Sequence
  Synthesized RNAi sequence
uuuuagaucuucgcaggcaaga

SEQ ID NO: 8616 - RNA, 22 nt, Artificial Sequence
  Synthesized RNAi sequence
uuuuaguaacaucagcuccauc

SEQ ID NO: 8617 - RNA, 22 nt, Artificial Sequence
  Synthesized RNAi sequence
uuuuaucaccucucuuaagaaa

SEQ ID NO: 8618 - RNA, 22 nt, Artificial Sequence
  Synthesized RNAi sequence
uuuuaugguuguuguguaacug

SEQ ID NO: 8619 - RNA, 22 nt, Artificial Sequence
  Synthesized RNAi sequence
uuuuauuuuaguaacaucagcu

SEQ ID NO: 8620 - RNA, 22 nt, Artificial Sequence
  Synthesized RNAi sequence
uuuucaacuuuguuauagguga

SEQ ID NO: 8621 - RNA, 22 nt, Artificial Sequence
  Synthesized RNAi sequence
uuuucacauuacacucaagaac

SEQ ID NO: 8622 - RNA, 22 nt, Artificial Sequence
  Synthesized RNAi sequence
uuuucauaagcacucuuaagaa

SEQ ID NO: 8623 - RNA, 22 nt, Artificial Sequence
  Synthesized RNAi sequence
uuuuccacuacuucuucagaga

SEQ ID NO: 8624 - RNA, 22 nt, Artificial Sequence
  Synthesized RNAi sequence
uuuuccauacauaauaaaauga

SEQ ID NO: 8625 - RNA, 22 nt, Artificial Sequence
  Synthesized RNAi sequence
uuuucucaaagcuuucgcuagc

SEQ ID NO: 8626 - RNA, 22 nt, Artificial Sequence
  Synthesized RNAi sequence
uuuucucuguucaacugaaggu

SEQ ID NO: 8627 - RNA, 22 nt, Artificial Sequence
  Synthesized RNAi sequence
uuuugaccagcuuuaucaaagu

SEQ ID NO: 8628 - RNA, 22 nt, Artificial Sequence
  Synthesized RNAi sequence
uuuugcaagaaucuaaauuggc

SEQ ID NO: 8629 - RNA, 22 nt, Artificial Sequence
  Synthesized RNAi sequence
uuuugcagaugauucuucacau

SEQ ID NO: 8630 - RNA, 22 nt, Artificial Sequence
  Synthesized RNAi sequence
uuuuguagcuuguuuaccacac

SEQ ID NO: 8631 - RNA, 22 nt, Artificial Sequence
  Synthesized RNAi sequence
uuuugugcuccaaagacaacgu

SEQ ID NO: 8632 - RNA, 22 nt, Artificial Sequence
  Synthesized RNAi sequence
uuuuguucaacuugcuuuucac

SEQ ID NO: 8633 - RNA, 22 nt, Artificial Sequence
  Synthesized RNAi sequence
aaacaaguaucuguagaugcua

SEQ ID NO: 8634 - RNA, 22 nt, Artificial Sequence
  Synthesized RNAi sequence
aaacacaagcugauguugcaaa

SEQ ID NO: 8635 - RNA, 22 nt, Artificial Sequence
  Synthesized RNAi sequence
aaacaccagcuucugaucuuuc

SEQ ID NO: 8636 - RNA, 22 nt, Artificial Sequence
  Synthesized RNAi sequence
aaacaccagguaagaaugagua

SEQ ID NO: 8637 - RNA, 22 nt, Artificial Sequence
  Synthesized RNAi sequence
aaacaccauuaaagacuacacg

SEQ ID NO: 8638 - RNA, 22 nt, Artificial Sequence
  Synthesized RNAi sequence
aaacagaguacagugaaugaca

SEQ ID NO: 8639 - RNA, 22 nt, Artificial Sequence
  Synthesized RNAi sequence
aaacagcugaggugauagaggu

SEQ ID NO: 8640 - RNA, 22 nt, Artificial Sequence
  Synthesized RNAi sequence
aaaccaggcacgacaaaaccca

SEQ ID NO: 8641 - RNA, 22 nt, Artificial Sequence
  Synthesized RNAi sequence
aaaccaugugucaaaaucagca

SEQ ID NO: 8642 - RNA, 22 nt, Artificial Sequence
  Synthesized RNAi sequence
aaacccacuucucuuguuauga

SEQ ID NO: 8643 - RNA, 22 nt, Artificial Sequence
  Synthesized RNAi sequence
aaaccucauaaaauaguaggca

SEQ ID NO: 8644 - RNA, 22 nt, Artificial Sequence
  Synthesized RNAi sequence
aaacuccugguaaagaucugua

SEQ ID NO: 8645 - RNA, 22 nt, Artificial Sequence
  Synthesized RNAi sequence
aaacugguguuaaacagaguac

SEQ ID NO: 8646 - RNA, 22 nt, Artificial Sequence
  Synthesized RNAi sequence
aaacuuucauaagcaacagaac

SEQ ID NO: 8647 - RNA, 22 nt, Artificial Sequence
  Synthesized RNAi sequence
aaagaaccaauagaaaugcuuu

SEQ ID NO: 8648 - RNA, 22 nt, Artificial Sequence
  Synthesized RNAi sequence
aaagacuacacgucucuuuagg

SEQ ID NO: 8649 - RNA, 22 nt, Artificial Sequence
  Synthesized RNAi sequence
aaagagcuaaguaucuauuaua

SEQ ID NO: 8650 - RNA, 22 nt, Artificial Sequence
  Synthesized RNAi sequence
aaagaucuguaauaaucauugu

SEQ ID NO: 8651 - RNA, 22 nt, Artificial Sequence
  Synthesized RNAi sequence
aaagcaccaauagguugaauua

SEQ ID NO: 8652 - RNA, 22 nt, Artificial Sequence
  Synthesized RNAi sequence
aaagcucuucuaaaccucauaa

SEQ ID NO: 8653 - RNA, 22 nt, Artificial Sequence
  Synthesized RNAi sequence
aaaggaaacaccauuaaagacu

SEQ ID NO: 8654 - RNA, 22 nt, Artificial Sequence
  Synthesized RNAi sequence
aaaggcaacuacaugacuguau

SEQ ID NO: 8655 - RNA, 22 nt, Artificial Sequence
  Synthesized RNAi sequence
aaaggugugaacauaaccaucc

SEQ ID NO: 8656 - RNA, 22 nt, Artificial Sequence
  Synthesized RNAi sequence
aaaguacuaaaggaaacaccau

SEQ ID NO: 8657 - RNA, 22 nt, Artificial Sequence
  Synthesized RNAi sequence
aaaguauuaaaggcaacuacau

SEQ ID NO: 8658 - RNA, 22 nt, Artificial Sequence
  Synthesized RNAi sequence
aaagucaguauguuuagacaug

SEQ ID NO: 8659 - RNA, 22 nt, Artificial Sequence
  Synthesized RNAi sequence
aaagucaguguacucuauaagu

SEQ ID NO: 8660 - RNA, 22 nt, Artificial Sequence
  Synthesized RNAi sequence
aaaguuguuaccacucuaacag

SEQ ID NO: 8661 - RNA, 22 nt, Artificial Sequence
  Synthesized RNAi sequence
aaauaacagaauaaacaccagg

SEQ ID NO: 8662 - RNA, 22 nt, Artificial Sequence
  Synthesized RNAi sequence
aaauaguaggcaaggcauguua

SEQ ID NO: 8663 - RNA, 22 nt, Artificial Sequence
  Synthesized RNAi sequence
aaaucagcauguuuguuagcaa

SEQ ID NO: 8664 - RNA, 22 nt, Artificial Sequence
  Synthesized RNAi sequence
aaaugcuuuguggaaauacaaa

SEQ ID NO: 8665 - RNA, 22 nt, Artificial Sequence
  Synthesized RNAi sequence
aaaugucaaguacaaguaaaua

SEQ ID NO: 8666 - RNA, 22 nt, Artificial Sequence
  Synthesized RNAi sequence
aaauugaauaauagagccaucc

SEQ ID NO: 8667 - RNA, 22 nt, Artificial Sequence
  Synthesized RNAi sequence
aaauuuacagcaucuacaccac

SEQ ID NO: 8668 - RNA, 22 nt, Artificial Sequence
  Synthesized RNAi sequence
aacaagcagcuucucuguagcu

SEQ ID NO: 8669 - RNA, 22 nt, Artificial Sequence
  Synthesized RNAi sequence
aacaaguaucuguagaugcuau

SEQ ID NO: 8670 - RNA, 22 nt, Artificial Sequence
  Synthesized RNAi sequence
aacaauaugguacuggcuuacc

SEQ ID NO: 8671 - RNA, 22 nt, Artificial Sequence
  Synthesized RNAi sequence
aacacaagcugauguugcaaag

SEQ ID NO: 8672 - RNA, 22 nt, Artificial Sequence
  Synthesized RNAi sequence
aacaccagcuucugaucuuuca

SEQ ID NO: 8673 - RNA, 22 nt, Artificial Sequence
  Synthesized RNAi sequence
aacaccagguaagaaugaguaa

SEQ ID NO: 8674 - RNA, 22 nt, Artificial Sequence
  Synthesized RNAi sequence
aacaccauuaaagacuacacgu

SEQ ID NO: 8675 - RNA, 22 nt, Artificial Sequence
  Synthesized RNAi sequence
aacagaaccuucaagguaggug

SEQ ID NO: 8676 - RNA, 22 nt, Artificial Sequence
  Synthesized RNAi sequence
aacagaaccuucuaguacauug

SEQ ID NO: 8677 - RNA, 22 nt, Artificial Sequence
  Synthesized RNAi sequence
aacagaauaaacaccagguaag

SEQ ID NO: 8678 - RNA, 22 nt, Artificial Sequence
  Synthesized RNAi sequence
aacagaguacagugaaugacau

SEQ ID NO: 8679 - RNA, 22 nt, Artificial Sequence
  Synthesized RNAi sequence
aacagcugaggugauagagguu

SEQ ID NO: 8680 - RNA, 22 nt, Artificial Sequence
  Synthesized RNAi sequence
aacagguguuauuaaauagaaa

SEQ ID NO: 8681 - RNA, 22 nt, Artificial Sequence
  Synthesized RNAi sequence
aaccaauagaaaugcuuugugg

SEQ ID NO: 8682 - RNA, 22 nt, Artificial Sequence
  Synthesized RNAi sequence
aaccaggcacgacaaaacccac

SEQ ID NO: 8683 - RNA, 22 nt, Artificial Sequence
  Synthesized RNAi sequence
aacccacuucucuuguuaugac

SEQ ID NO: 8684 - RNA, 22 nt, Artificial Sequence
  Synthesized RNAi sequence
aaccucauaaaauaguaggcaa

SEQ ID NO: 8685 - RNA, 22 nt, Artificial Sequence
  Synthesized RNAi sequence
aaccugaguuacugaagucauu

SEQ ID NO: 8686 - RNA, 22 nt, Artificial Sequence
  Synthesized RNAi sequence
aaccuucaagguagguguuagg

SEQ ID NO: 8687 - RNA, 22 nt, Artificial Sequence
  Synthesized RNAi sequence
aaccuucuaguacauugguauc

SEQ ID NO: 8688 - RNA, 22 nt, Artificial Sequence
  Synthesized RNAi sequence
aacgugugucagggcguaaacu

SEQ ID NO: 8689 - RNA, 22 nt, Artificial Sequence
  Synthesized RNAi sequence
aacuacaugacuguauucacca

SEQ ID NO: 8690 - RNA, 22 nt, Artificial Sequence
  Synthesized RNAi sequence
aacuaccaccacgcuggcuaaa

SEQ ID NO: 8691 - RNA, 22 nt, Artificial Sequence
  Synthesized RNAi sequence
aacugguguuaaacagaguaca

SEQ ID NO: 8692 - RNA, 22 nt, Artificial Sequence
  Synthesized RNAi sequence
aacuuucauaagcaacagaacc

SEQ ID NO: 8693 - RNA, 22 nt, Artificial Sequence
  Synthesized RNAi sequence
aagaacaucagaaccugaguua

SEQ ID NO: 8694 - RNA, 22 nt, Artificial Sequence
  Synthesized RNAi sequence
aagaaccaauagaaaugcuuug

SEQ ID NO: 8695 - RNA, 22 nt, Artificial Sequence
  Synthesized RNAi sequence
aagacuacacgucucuuuaggu

SEQ ID NO: 8696 - RNA, 22 nt, Artificial Sequence
  Synthesized RNAi sequence
aagagcuaaguaucuauuauau

SEQ ID NO: 8697 - RNA, 22 nt, Artificial Sequence
  Synthesized RNAi sequence
aagagguaauagcacaucacua

SEQ ID NO: 8698 - RNA, 22 nt, Artificial Sequence
  Synthesized RNAi sequence
aagauaaaaugucaaguacaag

SEQ ID NO: 8699 - RNA, 22 nt, Artificial Sequence
  Synthesized RNAi sequence
aagaucuguaauaaucauuguu

SEQ ID NO: 8700 - RNA, 22 nt, Artificial Sequence
  Synthesized RNAi sequence
aagcaacagaaccuucuaguac

SEQ ID NO: 8701 - RNA, 22 nt, Artificial Sequence
  Synthesized RNAi sequence
aagcaccaauagguugaauuag

SEQ ID NO: 8702 - RNA, 22 nt, Artificial Sequence
  Synthesized RNAi sequence
aagcucuucuaaaccucauaaa

SEQ ID NO: 8703 - RNA, 22 nt, Artificial Sequence
  Synthesized RNAi sequence
aagcugauguugcaaagucagu

SEQ ID NO: 8704 - RNA, 22 nt, Artificial Sequence
  Synthesized RNAi sequence
aagcuuugucauuaguauaacu

SEQ ID NO: 8705 - RNA, 22 nt, Artificial Sequence
  Synthesized RNAi sequence
aaggaaacaccauuaaagacua

SEQ ID NO: 8706 - RNA, 22 nt, Artificial Sequence
  Synthesized RNAi sequence
aaggaauaguaaaguauuaaag

SEQ ID NO: 8707 - RNA, 22 nt, Artificial Sequence
  Synthesized RNAi sequence
aaggcaacuacaugacuguauu

SEQ ID NO: 8708 - RNA, 22 nt, Artificial Sequence
  Synthesized RNAi sequence
aaggcauguuacuacgauagcu

SEQ ID NO: 8709 - RNA, 22 nt, Artificial Sequence
  Synthesized RNAi sequence
aagguacuaaaggugugaacau

SEQ ID NO: 8710 - RNA, 22 nt, Artificial Sequence
  Synthesized RNAi sequence
aagguagguguuaggaaauuga

SEQ ID NO: 8711 - RNA, 22 nt, Artificial Sequence
  Synthesized RNAi sequence
aaggugugaacauaaccaucca

SEQ ID NO: 8712 - RNA, 22 nt, Artificial Sequence
  Synthesized RNAi sequence
aaguaaauaacagaauaaacac

SEQ ID NO: 8713 - RNA, 22 nt, Artificial Sequence
  Synthesized RNAi sequence
aaguaaauuuacagcaucuaca

SEQ ID NO: 8714 - RNA, 22 nt, Artificial Sequence
  Synthesized RNAi sequence
aaguacaaguaaauaacagaau

SEQ ID NO: 8715 - RNA, 22 nt, Artificial Sequence
  Synthesized RNAi sequence
aaguacccaucuaccacuagua

SEQ ID NO: 8716 - RNA, 22 nt, Artificial Sequence
  Synthesized RNAi sequence
aaguacuaaaggaaacaccauu

SEQ ID NO: 8717 - RNA, 22 nt, Artificial Sequence
  Synthesized RNAi sequence
aaguaucuauuauauugcguaa

SEQ ID NO: 8718 - RNA, 22 nt, Artificial Sequence
  Synthesized RNAi sequence
aaguaucuguagaugcuauguc

SEQ ID NO: 8719 - RNA, 22 nt, Artificial Sequence
  Synthesized RNAi sequence
aaguauuaaaggcaacuacaug

SEQ ID NO: 8720 - RNA, 22 nt, Artificial Sequence
  Synthesized RNAi sequence
aagucaguauguuuagacauga

SEQ ID NO: 8721 - RNA, 22 nt, Artificial Sequence
  Synthesized RNAi sequence
aagucaguguacucuauaaguu

SEQ ID NO: 8722 - RNA, 22 nt, Artificial Sequence
  Synthesized RNAi sequence
aagucauugagagccuuugcga

SEQ ID NO: 8723 - RNA, 22 nt, Artificial Sequence
  Synthesized RNAi sequence
aagugccgugccuacaguacuc

SEQ ID NO: 8724 - RNA, 22 nt, Artificial Sequence
  Synthesized RNAi sequence
aaguuguuaccacucuaacaga

SEQ ID NO: 8725 - RNA, 22 nt, Artificial Sequence
  Synthesized RNAi sequence
aaguuuugaugguguguaacag

SEQ ID NO: 8726 - RNA, 22 nt, Artificial Sequence
  Synthesized RNAi sequence
aauaaacaccagguaagaauga

SEQ ID NO: 8727 - RNA, 22 nt, Artificial Sequence
  Synthesized RNAi sequence
aauaacagaauaaacaccaggu

SEQ ID NO: 8728 - RNA, 22 nt, Artificial Sequence
  Synthesized RNAi sequence
aauaauagagccauccaugagc

SEQ ID NO: 8729 - RNA, 22 nt, Artificial Sequence
  Synthesized RNAi sequence
aauaaucauuguuaaguaccca

SEQ ID NO: 8730 - RNA, 22 nt, Artificial Sequence
  Synthesized RNAi sequence
aauaccaccagcuacuauagau

SEQ ID NO: 8731 - RNA, 22 nt, Artificial Sequence
  Synthesized RNAi sequence
aauacuuguacuuauuauaaag

SEQ ID NO: 8732 - RNA, 22 nt, Artificial Sequence
  Synthesized RNAi sequence
aauagaaaugcuuuguggaaau

SEQ ID NO: 8733 - RNA, 22 nt, Artificial Sequence
  Synthesized RNAi sequence
aauagagccauccaugagcaca

SEQ ID NO: 8734 - RNA, 22 nt, Artificial Sequence
  Synthesized RNAi sequence
aauagcacaucacuacgcaacu

SEQ ID NO: 8735 - RNA, 22 nt, Artificial Sequence
  Synthesized RNAi sequence
aauagccuuguauccuaugauu

SEQ ID NO: 8736 - RNA, 22 nt, Artificial Sequence
  Synthesized RNAi sequence
aauagguugaauuaguggugua

SEQ ID NO: 8737 - RNA, 22 nt, Artificial Sequence
  Synthesized RNAi sequence
aauaguaaaguauuaaaggcaa

SEQ ID NO: 8738 - RNA, 22 nt, Artificial Sequence
  Synthesized RNAi sequence
aauaguaggcaaggcauguuac

SEQ ID NO: 8739 - RNA, 22 nt, Artificial Sequence
  Synthesized RNAi sequence
aauaucgugccaggcaaaccag

SEQ ID NO: 8740 - RNA, 22 nt, Artificial Sequence
  Synthesized RNAi sequence
aaucaaaaguuguuaccacucu

SEQ ID NO: 8741 - RNA, 22 nt, Artificial Sequence
  Synthesized RNAi sequence
aaucaaugggcaagcuuuguca

SEQ ID NO: 8742 - RNA, 22 nt, Artificial Sequence
  Synthesized RNAi sequence
aaucagcauguuuguuagcaaa

SEQ ID NO: 8743 - RNA, 22 nt, Artificial Sequence
  Synthesized RNAi sequence
aaucauuguuaaguacccaucu

SEQ ID NO: 8744 - RNA, 22 nt, Artificial Sequence
  Synthesized RNAi sequence
aaugacauaaggaauaguaaag

SEQ ID NO: 8745 - RNA, 22 nt, Artificial Sequence
  Synthesized RNAi sequence
aaugggcaagcuuugucauuag

SEQ ID NO: 8746 - RNA, 22 nt, Artificial Sequence
  Synthesized RNAi sequence
aaugucaaguacaaguaaauaa

SEQ ID NO: 8747 - RNA, 22 nt, Artificial Sequence
  Synthesized RNAi sequence
aauuacuaaagaaccaauagaa

SEQ ID NO: 8748 - RNA, 22 nt, Artificial Sequence
  Synthesized RNAi sequence
aauuagugguguaaacauauua

SEQ ID NO: 8749 - RNA, 22 nt, Artificial Sequence
  Synthesized RNAi sequence
aauugaauaauagagccaucca

SEQ ID NO: 8750 - RNA, 22 nt, Artificial Sequence
  Synthesized RNAi sequence
aauuuacagcaucuacaccaca

SEQ ID NO: 8751 - RNA, 22 nt, Artificial Sequence
  Synthesized RNAi sequence
acaaaacccacuucucuuguua

SEQ ID NO: 8752 - RNA, 22 nt, Artificial Sequence
  Synthesized RNAi sequence
acaaacaccagcuucugaucuu

SEQ ID NO: 8753 - RNA, 22 nt, Artificial Sequence
  Synthesized RNAi sequence
acaacaagcagcuucucuguag

SEQ ID NO: 8754 - RNA, 22 nt, Artificial Sequence
  Synthesized RNAi sequence
acaagcagcuucucuguagcua

SEQ ID NO: 8755 - RNA, 22 nt, Artificial Sequence
  Synthesized RNAi sequence
acaagcugauguugcaaaguca

SEQ ID NO: 8756 - RNA, 22 nt, Artificial Sequence
  Synthesized RNAi sequence
acaaguaucuguagaugcuaug

SEQ ID NO: 8757 - RNA, 22 nt, Artificial Sequence
  Synthesized RNAi sequence
acaagugccgugccuacaguac

SEQ ID NO: 8758 - RNA, 22 nt, Artificial Sequence
  Synthesized RNAi sequence
acaauaccaccagcuacuauag

SEQ ID NO: 8759 - RNA, 22 nt, Artificial Sequence
  Synthesized RNAi sequence
acaauaugguacuggcuuacca

SEQ ID NO: 8760 - RNA, 22 nt, Artificial Sequence
  Synthesized RNAi sequence
acacaaacaccagcuucugauc

SEQ ID NO: 8761 - RNA, 22 nt, Artificial Sequence
  Synthesized RNAi sequence
acacaagcugauguugcaaagu

SEQ ID NO: 8762 - RNA, 22 nt, Artificial Sequence
  Synthesized RNAi sequence
acaccacagaaaacuccuggua

SEQ ID NO: 8763 - RNA, 22 nt, Artificial Sequence
  Synthesized RNAi sequence
acaccaccaucaauagccuugu

SEQ ID NO: 8764 - RNA, 22 nt, Artificial Sequence
  Synthesized RNAi sequence
acaccagcuucugaucuuucac

SEQ ID NO: 8765 - RNA, 22 nt, Artificial Sequence
  Synthesized RNAi sequence
acaccagguaagaaugaguaaa

SEQ ID NO: 8766 - RNA, 22 nt, Artificial Sequence
  Synthesized RNAi sequence
acaccauuaaagacuacacguc

SEQ ID NO: 8767 - RNA, 22 nt, Artificial Sequence
  Synthesized RNAi sequence
acacgucucuuuagguaauuac

SEQ ID NO: 8768 - RNA, 22 nt, Artificial Sequence
  Synthesized RNAi sequence
acagaaaacuccugguaaagau

SEQ ID NO: 8769 - RNA, 22 nt, Artificial Sequence
  Synthesized RNAi sequence
acagaaccuucaagguaggugu

SEQ ID NO: 8770 - RNA, 22 nt, Artificial Sequence
  Synthesized RNAi sequence
acagaaccuucuaguacauugg

SEQ ID NO: 8771 - RNA, 22 nt, Artificial Sequence
  Synthesized RNAi sequence
acagaauaaacaccagguaaga

SEQ ID NO: 8772 - RNA, 22 nt, Artificial Sequence
  Synthesized RNAi sequence
acagaguacagugaaugacaua

SEQ ID NO: 8773 - RNA, 22 nt, Artificial Sequence
  Synthesized RNAi sequence
acagcugaggugauagagguuu

SEQ ID NO: 8774 - RNA, 22 nt, Artificial Sequence
  Synthesized RNAi sequence
acaguacucagaaucaaaaguu

SEQ ID NO: 8775 - RNA, 22 nt, Artificial Sequence
  Synthesized RNAi sequence
acagugaaugacauaaggaaua

SEQ ID NO: 8776 - RNA, 22 nt, Artificial Sequence
  Synthesized RNAi sequence
acauaacgugugucagggcgua

SEQ ID NO: 8777 - RNA, 22 nt, Artificial Sequence
  Synthesized RNAi sequence
acauauuaguaaguaaauuuac

SEQ ID NO: 8778 - RNA, 22 nt, Artificial Sequence
  Synthesized RNAi sequence
acaucacuacgcaacuuuagau

SEQ ID NO: 8779 - RNA, 22 nt, Artificial Sequence
  Synthesized RNAi sequence
acaucagaaccugaguuacuga

SEQ ID NO: 8780 - RNA, 22 nt, Artificial Sequence
  Synthesized RNAi sequence
acaugaacagguguuauuaaau

SEQ ID NO: 8781 - RNA, 22 nt, Artificial Sequence
  Synthesized RNAi sequence
acaugacuguauucaccaaaag

SEQ ID NO: 8782 - RNA, 22 nt, Artificial Sequence
  Synthesized RNAi sequence
acauugguaucauaacaauaug

SEQ ID NO: 8783 - RNA, 22 nt, Artificial Sequence
  Synthesized RNAi sequence
accaaaagcucuucuaaaccuc

SEQ ID NO: 8784 - RNA, 22 nt, Artificial Sequence
  Synthesized RNAi sequence
accaauagaaaugcuuugugga

SEQ ID NO: 8785 - RNA, 22 nt, Artificial Sequence
  Synthesized RNAi sequence
accaauagguugaauuaguggu

SEQ ID NO: 8786 - RNA, 22 nt, Artificial Sequence
  Synthesized RNAi sequence
accacagaaaacuccugguaaa

SEQ ID NO: 8787 - RNA, 22 nt, Artificial Sequence
  Synthesized RNAi sequence
accaccacgcuggcuaaaccau

SEQ ID NO: 8788 - RNA, 22 nt, Artificial Sequence
  Synthesized RNAi sequence
accaccaucaauagccuuguau

SEQ ID NO: 8789 - RNA, 22 nt, Artificial Sequence
  Synthesized RNAi sequence
accacgcuggcuaaaccaugug

SEQ ID NO: 8790 - RNA, 22 nt, Artificial Sequence
  Synthesized RNAi sequence
accacuaguagauacacaaaca

SEQ ID NO: 8791 - RNA, 22 nt, Artificial Sequence
  Synthesized RNAi sequence
accacucuaacagaaccuucaa

SEQ ID NO: 8792 - RNA, 22 nt, Artificial Sequence
  Synthesized RNAi sequence
accagcuacuauagaugcugau

SEQ ID NO: 8793 - RNA, 22 nt, Artificial Sequence
  Synthesized RNAi sequence
accagcuucugaucuuucacaa

SEQ ID NO: 8794 - RNA, 22 nt, Artificial Sequence
  Synthesized RNAi sequence
accaggcacgacaaaacccacu

SEQ ID NO: 8795 - RNA, 22 nt, Artificial Sequence
  Synthesized RNAi sequence
accagguaagaaugaguaaacu

SEQ ID NO: 8796 - RNA, 22 nt, Artificial Sequence
  Synthesized RNAi sequence
accaucaauagccuuguauccu

SEQ ID NO: 8797 - RNA, 22 nt, Artificial Sequence
  Synthesized RNAi sequence
accaugugucaaaaucagcaug

SEQ ID NO: 8798 - RNA, 22 nt, Artificial Sequence
  Synthesized RNAi sequence
accauuaaagacuacacgucuc

SEQ ID NO: 8799 - RNA, 22 nt, Artificial Sequence
  Synthesized RNAi sequence
acccacuucucuuguuaugacu

SEQ ID NO: 8800 - RNA, 22 nt, Artificial Sequence
  Synthesized RNAi sequence
acccaucuaccacuaguagaua

SEQ ID NO: 8801 - RNA, 22 nt, Artificial Sequence
  Synthesized RNAi sequence
accugaguuacugaagucauug

SEQ ID NO: 8802 - RNA, 22 nt, Artificial Sequence
  Synthesized RNAi sequence
accuucaagguagguguuagga

SEQ ID NO: 8803 - RNA, 22 nt, Artificial Sequence
  Synthesized RNAi sequence
accuucuaguacauugguauca

SEQ ID NO: 8804 - RNA, 22 nt, Artificial Sequence
  Synthesized RNAi sequence
acgacaaaacccacuucucuug

SEQ ID NO: 8805 - RNA, 22 nt, Artificial Sequence
  Synthesized RNAi sequence
acgagugacaccaccaucaaua

SEQ ID NO: 8806 - RNA, 22 nt, Artificial Sequence
  Synthesized RNAi sequence
acgauagcuacaauaccaccag

SEQ ID NO: 8807 - RNA, 22 nt, Artificial Sequence
  Synthesized RNAi sequence
acgcuggcuaaaccauguguca

SEQ ID NO: 8808 - RNA, 22 nt, Artificial Sequence
  Synthesized RNAi sequence
acgucucuuuagguaauuacua

SEQ ID NO: 8809 - RNA, 22 nt, Artificial Sequence
  Synthesized RNAi sequence
acuaaaauacuuguacuuauua

SEQ ID NO: 8810 - RNA, 22 nt, Artificial Sequence
  Synthesized RNAi sequence
acuaaagaaccaauagaaaugc

SEQ ID NO: 8811 - RNA, 22 nt, Artificial Sequence
  Synthesized RNAi sequence
acuaaaggaaacaccauuaaag

SEQ ID NO: 8812 - RNA, 22 nt, Artificial Sequence
  Synthesized RNAi sequence
acuaaaggugugaacauaacca

SEQ ID NO: 8813 - RNA, 22 nt, Artificial Sequence
  Synthesized RNAi sequence
acuacacgucucuuuagguaau

SEQ ID NO: 8814 - RNA, 22 nt, Artificial Sequence
  Synthesized RNAi sequence
acuacaugacuguauucaccaa

SEQ ID NO: 8815 - RNA, 22 nt, Artificial Sequence
  Synthesized RNAi sequence
acuaccaccacgcuggcuaaac

SEQ ID NO: 8816 - RNA, 22 nt, Artificial Sequence
  Synthesized RNAi sequence
acuacgauagcuacaauaccac

SEQ ID NO: 8817 - RNA, 22 nt, Artificial Sequence
  Synthesized RNAi sequence
acuacgcaacuuuagauacauu

SEQ ID NO: 8818 - RNA, 22 nt, Artificial Sequence
  Synthesized RNAi sequence
acuaguagauacacaaacacca

SEQ ID NO: 8819 - RNA, 22 nt, Artificial Sequence
  Synthesized RNAi sequence
acuauagaugcugauaugucca

SEQ ID NO: 8820 - RNA, 22 nt, Artificial Sequence
  Synthesized RNAi sequence
acucagaaucaaaaguuguuac

SEQ ID NO: 8821 - RNA, 22 nt, Artificial Sequence
  Synthesized RNAi sequence
acucuaacagaaccuucaaggu

SEQ ID NO: 8822 - RNA, 22 nt, Artificial Sequence
  Synthesized RNAi sequence
acucuauaaguuuugauggugu

SEQ ID NO: 8823 - RNA, 22 nt, Artificial Sequence
  Synthesized RNAi sequence
acugaagucauugagagccuuu

SEQ ID NO: 8824 - RNA, 22 nt, Artificial Sequence
  Synthesized RNAi sequence
acugcagcaaucaaugggcaag

SEQ ID NO: 8825 - RNA, 22 nt, Artificial Sequence
  Synthesized RNAi sequence
acugguguuaaacagaguacag

SEQ ID NO: 8826 - RNA, 22 nt, Artificial Sequence
  Synthesized RNAi sequence
acuguauucaccaaaagcucuu

SEQ ID NO: 8827 - RNA, 22 nt, Artificial Sequence
  Synthesized RNAi sequence
acuuauuauaaagagcuaagua

SEQ ID NO: 8828 - RNA, 22 nt, Artificial Sequence
  Synthesized RNAi sequence
acuugaaaagucaguauguuua

SEQ ID NO: 8829 - RNA, 22 nt, Artificial Sequence
  Synthesized RNAi sequence
acuuguacuuauuauaaagagc

SEQ ID NO: 8830 - RNA, 22 nt, Artificial Sequence
  Synthesized RNAi sequence
acuuuaauuaacugcuucaacc

SEQ ID NO: 8831 - RNA, 22 nt, Artificial Sequence
  Synthesized RNAi sequence
acuuucauaagcaacagaaccu

SEQ ID NO: 8832 - RNA, 22 nt, Artificial Sequence
  Synthesized RNAi sequence
agaaaacuccugguaaagaucu

SEQ ID NO: 8833 - RNA, 22 nt, Artificial Sequence
  Synthesized RNAi sequence
agaaaugcuuuguggaaauaca

SEQ ID NO: 8834 - RNA, 22 nt, Artificial Sequence
  Synthesized RNAi sequence
agaacaucagaaccugaguuac

SEQ ID NO: 8835 - RNA, 22 nt, Artificial Sequence
  Synthesized RNAi sequence
agaaccaauagaaaugcuuugu

SEQ ID NO: 8836 - RNA, 22 nt, Artificial Sequence
  Synthesized RNAi sequence
agaaccugaguuacugaaguca

SEQ ID NO: 8837 - RNA, 22 nt, Artificial Sequence
  Synthesized RNAi sequence
agaaccuucaagguagguguua

SEQ ID NO: 8838 - RNA, 22 nt, Artificial Sequence
  Synthesized RNAi sequence
agaaccuucuaguacauuggua

SEQ ID NO: 8839 - RNA, 22 nt, Artificial Sequence
  Synthesized RNAi sequence
agaauaaacaccagguaagaau

SEQ ID NO: 8840 - RNA, 22 nt, Artificial Sequence
  Synthesized RNAi sequence
agaaucaaaaguuguuaccacu

SEQ ID NO: 8841 - RNA, 22 nt, Artificial Sequence
  Synthesized RNAi sequence
agaaugaguaaacugguguuaa

SEQ ID NO: 8842 - RNA, 22 nt, Artificial Sequence
  Synthesized RNAi sequence
agacuacacgucucuuuaggua

SEQ ID NO: 8843 - RNA, 22 nt, Artificial Sequence
  Synthesized RNAi sequence
agagccauccaugagcacauaa

SEQ ID NO: 8844 - RNA, 22 nt, Artificial Sequence
  Synthesized RNAi sequence
agagccuuugcgagaugacaac

SEQ ID NO: 8845 - RNA, 22 nt, Artificial Sequence
  Synthesized RNAi sequence
agagcuaaguaucuauuauauu

SEQ ID NO: 8846 - RNA, 22 nt, Artificial Sequence
  Synthesized RNAi sequence
agagguaauagcacaucacuac

SEQ ID NO: 8847 - RNA, 22 nt, Artificial Sequence
  Synthesized RNAi sequence
agagguuuguggugguugguaa

SEQ ID NO: 8848 - RNA, 22 nt, Artificial Sequence
  Synthesized RNAi sequence
agaguacagugaaugacauaag

SEQ ID NO: 8849 - RNA, 22 nt, Artificial Sequence
  Synthesized RNAi sequence
agauaaaaugucaaguacaagu

SEQ ID NO: 8850 - RNA, 22 nt, Artificial Sequence
  Synthesized RNAi sequence
agauacacaaacaccagcuucu

SEQ ID NO: 8851 - RNA, 22 nt, Artificial Sequence
  Synthesized RNAi sequence
agaucuguaauaaucauuguua

SEQ ID NO: 8852 - RNA, 22 nt, Artificial Sequence
  Synthesized RNAi sequence
agaugacaacaagcagcuucuc

SEQ ID NO: 8853 - RNA, 22 nt, Artificial Sequence
  Synthesized RNAi sequence
agaugcuaugucacgagugaca

SEQ ID NO: 8854 - RNA, 22 nt, Artificial Sequence
  Synthesized RNAi sequence
agaugcugauauguccaaagca

SEQ ID NO: 8855 - RNA, 22 nt, Artificial Sequence
  Synthesized RNAi sequence
agcaaaacaaguaucuguagau

SEQ ID NO: 8856 - RNA, 22 nt, Artificial Sequence
  Synthesized RNAi sequence
agcaacagaaccuucuaguaca

SEQ ID NO: 8857 - RNA, 22 nt, Artificial Sequence
  Synthesized RNAi sequence
agcaaucaaugggcaagcuuug

SEQ ID NO: 8858 - RNA, 22 nt, Artificial Sequence
  Synthesized RNAi sequence
agcacauaacgugugucagggc

SEQ ID NO: 8859 - RNA, 22 nt, Artificial Sequence
  Synthesized RNAi sequence
agcacaucacuacgcaacuuua

SEQ ID NO: 8860 - RNA, 22 nt, Artificial Sequence
  Synthesized RNAi sequence
agcaccaauagguugaauuagu

SEQ ID NO: 8861 - RNA, 22 nt, Artificial Sequence
  Synthesized RNAi sequence
agcagccaaaacacaagcugau

SEQ ID NO: 8862 - RNA, 22 nt, Artificial Sequence
  Synthesized RNAi sequence
agcagcuucucuguagcuaguu

SEQ ID NO: 8863 - RNA, 22 nt, Artificial Sequence
  Synthesized RNAi sequence
agcaucuacaccacagaaaacu

SEQ ID NO: 8864 - RNA, 22 nt, Artificial Sequence
  Synthesized RNAi sequence
agcauguuuguuagcaaaacaa

SEQ ID NO: 8865 - RNA, 22 nt, Artificial Sequence
  Synthesized RNAi sequence
agccaaaacacaagcugauguu

SEQ ID NO: 8866 - RNA, 22 nt, Artificial Sequence
  Synthesized RNAi sequence
agccauccaugagcacauaacg

SEQ ID NO: 8867 - RNA, 22 nt, Artificial Sequence
  Synthesized RNAi sequence
agccuuguauccuaugauuuca

SEQ ID NO: 8868 - RNA, 22 nt, Artificial Sequence
  Synthesized RNAi sequence
agccuuugcgagaugacaacaa

SEQ ID NO: 8869 - RNA, 22 nt, Artificial Sequence
  Synthesized RNAi sequence
agcuaaguaucuauuauauugc

SEQ ID NO: 8870 - RNA, 22 nt, Artificial Sequence
  Synthesized RNAi sequence
agcuacaauaccaccagcuacu

SEQ ID NO: 8871 - RNA, 22 nt, Artificial Sequence
  Synthesized RNAi sequence
agcuacuauagaugcugauaug

SEQ ID NO: 8872 - RNA, 22 nt, Artificial Sequence
  Synthesized RNAi sequence
agcuaguuguauccauugcucc

SEQ ID NO: 8873 - RNA, 22 nt, Artificial Sequence
  Synthesized RNAi sequence
agcucuucuaaaccucauaaaa

SEQ ID NO: 8874 - RNA, 22 nt, Artificial Sequence
  Synthesized RNAi sequence
agcugaggugauagagguuugu

SEQ ID NO: 8875 - RNA, 22 nt, Artificial Sequence
  Synthesized RNAi sequence
agcugauguugcaaagucagug

SEQ ID NO: 8876 - RNA, 22 nt, Artificial Sequence
  Synthesized RNAi sequence
agcuucucuguagcuaguugua

SEQ ID NO: 8877 - RNA, 22 nt, Artificial Sequence
  Synthesized RNAi sequence
agcuucugaucuuucacaagug

SEQ ID NO: 8878 - RNA, 22 nt, Artificial Sequence
  Synthesized RNAi sequence
agcuuugucauuaguauaacua

SEQ ID NO: 8879 - RNA, 22 nt, Artificial Sequence
  Synthesized RNAi sequence
aggaaacaccauuaaagacuac

SEQ ID NO: 8880 - RNA, 22 nt, Artificial Sequence
  Synthesized RNAi sequence
aggaaauugaauaauagagcca

SEQ ID NO: 8881 - RNA, 22 nt, Artificial Sequence
  Synthesized RNAi sequence
aggaauaguaaaguauuaaagg

SEQ ID NO: 8882 - RNA, 22 nt, Artificial Sequence
  Synthesized RNAi sequence
aggcaaaccaggcacgacaaaa

SEQ ID NO: 8883 - RNA, 22 nt, Artificial Sequence
  Synthesized RNAi sequence
aggcaacuacaugacuguauuc

SEQ ID NO: 8884 - RNA, 22 nt, Artificial Sequence
  Synthesized RNAi sequence
aggcaaggcauguuacuacgau

SEQ ID NO: 8885 - RNA, 22 nt, Artificial Sequence
  Synthesized RNAi sequence
aggcacgacaaaacccacuucu

SEQ ID NO: 8886 - RNA, 22 nt, Artificial Sequence
  Synthesized RNAi sequence
aggcauguuacuacgauagcua

SEQ ID NO: 8887 - RNA, 22 nt, Artificial Sequence
  Synthesized RNAi sequence
agggcguaaacuuucauaagca

SEQ ID NO: 8888 - RNA, 22 nt, Artificial Sequence
  Synthesized RNAi sequence
agguaagaaugaguaaacuggu

SEQ ID NO: 8889 - RNA, 22 nt, Artificial Sequence
  Synthesized RNAi sequence
agguaauagcacaucacuacgc

SEQ ID NO: 8890 - RNA, 22 nt, Artificial Sequence
  Synthesized RNAi sequence
agguacuaaaggugugaacaua

SEQ ID NO: 8891 - RNA, 22 nt, Artificial Sequence
  Synthesized RNAi sequence
agguagguguuaggaaauugaa

SEQ ID NO: 8892 - RNA, 22 nt, Artificial Sequence
  Synthesized RNAi sequence
aggugauagagguuuguggugg

SEQ ID NO: 8893 - RNA, 22 nt, Artificial Sequence
  Synthesized RNAi sequence
aggugugaacauaaccauccac

SEQ ID NO: 8894 - RNA, 22 nt, Artificial Sequence
  Synthesized RNAi sequence
agguguuaggaaauugaauaau

SEQ ID NO: 8895 - RNA, 22 nt, Artificial Sequence
  Synthesized RNAi sequence
agguugaauuagugguguaaac

SEQ ID NO: 8896 - RNA, 22 nt, Artificial Sequence
  Synthesized RNAi sequence
agguuuguggugguugguaaag

SEQ ID NO: 8897 - RNA, 22 nt, Artificial Sequence
  Synthesized RNAi sequence
aguaaacugguguuaaacagag

SEQ ID NO: 8898 - RNA, 22 nt, Artificial Sequence
  Synthesized RNAi sequence
aguaaaguauuaaaggcaacua

SEQ ID NO: 8899 - RNA, 22 nt, Artificial Sequence
  Synthesized RNAi sequence
aguaaauaacagaauaaacacc

SEQ ID NO: 8900 - RNA, 22 nt, Artificial Sequence
  Synthesized RNAi sequence
aguaaauuuacagcaucuacac

SEQ ID NO: 8901 - RNA, 22 nt, Artificial Sequence
  Synthesized RNAi sequence
aguaagauaaaaugucaaguac

SEQ ID NO: 8902 - RNA, 22 nt, Artificial Sequence
  Synthesized RNAi sequence
aguaaguaaauuuacagcaucu

SEQ ID NO: 8903 - RNA, 22 nt, Artificial Sequence
  Synthesized RNAi sequence
aguacaaguaaauaacagaaua

SEQ ID NO: 8904 - RNA, 22 nt, Artificial Sequence
  Synthesized RNAi sequence
aguacagugaaugacauaagga

SEQ ID NO: 8905 - RNA, 22 nt, Artificial Sequence
  Synthesized RNAi sequence
aguacccaucuaccacuaguag

SEQ ID NO: 8906 - RNA, 22 nt, Artificial Sequence
  Synthesized RNAi sequence
aguacuaaaggaaacaccauua

SEQ ID NO: 8907 - RNA, 22 nt, Artificial Sequence
  Synthesized RNAi sequence
aguacucagaaucaaaaguugu

SEQ ID NO: 8908 - RNA, 22 nt, Artificial Sequence
  Synthesized RNAi sequence
aguagauacacaaacaccagcu

SEQ ID NO: 8909 - RNA, 22 nt, Artificial Sequence
  Synthesized RNAi sequence
aguaggcaaggcauguuacuac

SEQ ID NO: 8910 - RNA, 22 nt, Artificial Sequence
  Synthesized RNAi sequence
aguauaacuaccaccacgcugg

SEQ ID NO: 8911 - RNA, 22 nt, Artificial Sequence
  Synthesized RNAi sequence
aguaucuauuauauugcguaag

SEQ ID NO: 8912 - RNA, 22 nt, Artificial Sequence
  Synthesized RNAi sequence
aguaucuguagaugcuauguca

SEQ ID NO: 8913 - RNA, 22 nt, Artificial Sequence
  Synthesized RNAi sequence
aguauguuuagacaugacauga

SEQ ID NO: 8914 - RNA, 22 nt, Artificial Sequence
  Synthesized RNAi sequence
agucaguauguuuagacaugac

SEQ ID NO: 8915 - RNA, 22 nt, Artificial Sequence
  Synthesized RNAi sequence
agucaguguacucuauaaguuu

SEQ ID NO: 8916 - RNA, 22 nt, Artificial Sequence
  Synthesized RNAi sequence
agucauugagagccuuugcgag

SEQ ID NO: 8917 - RNA, 22 nt, Artificial Sequence
  Synthesized RNAi sequence
agugaaugacauaaggaauagu

SEQ ID NO: 8918 - RNA, 22 nt, Artificial Sequence
  Synthesized RNAi sequence
agugacaccaccaucaauagcc

SEQ ID NO: 8919 - RNA, 22 nt, Artificial Sequence
  Synthesized RNAi sequence
agugccgugccuacaguacuca

SEQ ID NO: 8920 - RNA, 22 nt, Artificial Sequence
  Synthesized RNAi sequence
agugguguaaacauauuaguaa

SEQ ID NO: 8921 - RNA, 22 nt, Artificial Sequence
  Synthesized RNAi sequence
aguguacucuauaaguuuugau

SEQ ID NO: 8922 - RNA, 22 nt, Artificial Sequence
  Synthesized RNAi sequence
aguuacugaagucauugagagc

SEQ ID NO: 8923 - RNA, 22 nt, Artificial Sequence
  Synthesized RNAi sequence
aguuguauccauugcuccacua

SEQ ID NO: 8924 - RNA, 22 nt, Artificial Sequence
  Synthesized RNAi sequence
aguuguuaccacucuaacagaa

SEQ ID NO: 8925 - RNA, 22 nt, Artificial Sequence
  Synthesized RNAi sequence
aguuuugaugguguguaacaga

SEQ ID NO: 8926 - RNA, 22 nt, Artificial Sequence
  Synthesized RNAi sequence
auaaaauaguaggcaaggcaug

SEQ ID NO: 8927 - RNA, 22 nt, Artificial Sequence
  Synthesized RNAi sequence
auaaaaugucaaguacaaguaa

SEQ ID NO: 8928 - RNA, 22 nt, Artificial Sequence
  Synthesized RNAi sequence
auaaacaccagguaagaaugag

SEQ ID NO: 8929 - RNA, 22 nt, Artificial Sequence
  Synthesized RNAi sequence
auaaagagcuaaguaucuauua

SEQ ID NO: 8930 - RNA, 22 nt, Artificial Sequence
  Synthesized RNAi sequence
auaacaauaugguacuggcuua

SEQ ID NO: 8931 - RNA, 22 nt, Artificial Sequence
  Synthesized RNAi sequence
auaacgugugucagggcguaaa

SEQ ID NO: 8932 - RNA, 22 nt, Artificial Sequence
  Synthesized RNAi sequence
auaacuaccaccacgcuggcua

SEQ ID NO: 8933 - RNA, 22 nt, Artificial Sequence
  Synthesized RNAi sequence
auaaguuuugaugguguguaac

SEQ ID NO: 8934 - RNA, 22 nt, Artificial Sequence
  Synthesized RNAi sequence
auaauagagccauccaugagca

SEQ ID NO: 8935 - RNA, 22 nt, Artificial Sequence
  Synthesized RNAi sequence
auaaucauuguuaaguacccau

SEQ ID NO: 8936 - RNA, 22 nt, Artificial Sequence
  Synthesized RNAi sequence
auacacaaacaccagcuucuga

SEQ ID NO: 8937 - RNA, 22 nt, Artificial Sequence
  Synthesized RNAi sequence
auaccaccagcuacuauagaug

SEQ ID NO: 8938 - RNA, 22 nt, Artificial Sequence
  Synthesized RNAi sequence
auacuuguacuuauuauaaaga

SEQ ID NO: 8939 - RNA, 22 nt, Artificial Sequence
  Synthesized RNAi sequence
auagagccauccaugagcacau

SEQ ID NO: 8940 - RNA, 22 nt, Artificial Sequence
  Synthesized RNAi sequence
auagagguuuguggugguuggu

SEQ ID NO: 8941 - RNA, 22 nt, Artificial Sequence
  Synthesized RNAi sequence
auagaugcugauauguccaaag

SEQ ID NO: 8942 - RNA, 22 nt, Artificial Sequence
  Synthesized RNAi sequence
auagcacaucacuacgcaacuu

SEQ ID NO: 8943 - RNA, 22 nt, Artificial Sequence
  Synthesized RNAi sequence
auagccuuguauccuaugauuu

SEQ ID NO: 8944 - RNA, 22 nt, Artificial Sequence
  Synthesized RNAi sequence
auagcuacaauaccaccagcua

SEQ ID NO: 8945 - RNA, 22 nt, Artificial Sequence
  Synthesized RNAi sequence
auagguugaauuagugguguaa

SEQ ID NO: 8946 - RNA, 22 nt, Artificial Sequence
  Synthesized RNAi sequence
auaguaggcaaggcauguuacu

SEQ ID NO: 8947 - RNA, 22 nt, Artificial Sequence
  Synthesized RNAi sequence
auaucgugccaggcaaaccagg

SEQ ID NO: 8948 - RNA, 22 nt, Artificial Sequence
  Synthesized RNAi sequence
auauguccaaagcaccaauagg

SEQ ID NO: 8949 - RNA, 22 nt, Artificial Sequence
  Synthesized RNAi sequence
auauuaguaaguaaauuuacag

SEQ ID NO: 8950 - RNA, 22 nt, Artificial Sequence
  Synthesized RNAi sequence
auauugcguaagagguaauagc

SEQ ID NO: 8951 - RNA, 22 nt, Artificial Sequence
  Synthesized RNAi sequence
aucaaaaguuguuaccacucua

SEQ ID NO: 8952 - RNA, 22 nt, Artificial Sequence
  Synthesized RNAi sequence
aucaaugggcaagcuuugucau

SEQ ID NO: 8953 - RNA, 22 nt, Artificial Sequence
  Synthesized RNAi sequence
aucacuacgcaacuuuagauac

SEQ ID NO: 8954 - RNA, 22 nt, Artificial Sequence
  Synthesized RNAi sequence
aucagaaccugaguuacugaag

SEQ ID NO: 8955 - RNA, 22 nt, Artificial Sequence
  Synthesized RNAi sequence
aucagcauguuuguuagcaaaa

SEQ ID NO: 8956 - RNA, 22 nt, Artificial Sequence
  Synthesized RNAi sequence
aucauaacaauaugguacuggc

SEQ ID NO: 8957 - RNA, 22 nt, Artificial Sequence
  Synthesized RNAi sequence
aucauuguuaaguacccaucua

SEQ ID NO: 8958 - RNA, 22 nt, Artificial Sequence
  Synthesized RNAi sequence
auccaugagcacauaacgugug

SEQ ID NO: 8959 - RNA, 22 nt, Artificial Sequence
  Synthesized RNAi sequence
auccauugcuccacuaaaauac

SEQ ID NO: 8960 - RNA, 22 nt, Artificial Sequence
  Synthesized RNAi sequence
auccuaugauuucacuugaaaa

SEQ ID NO: 8961 - RNA, 22 nt, Artificial Sequence
  Synthesized RNAi sequence
aucgugccaggcaaaccaggca

SEQ ID NO: 8962 - RNA, 22 nt, Artificial Sequence
  Synthesized RNAi sequence
aucuacaccacagaaaacuccu

SEQ ID NO: 8963 - RNA, 22 nt, Artificial Sequence
  Synthesized RNAi sequence
aucuaccacuaguagauacaca

SEQ ID NO: 8964 - RNA, 22 nt, Artificial Sequence
  Synthesized RNAi sequence
aucuauuauauugcguaagagg

SEQ ID NO: 8965 - RNA, 22 nt, Artificial Sequence
  Synthesized RNAi sequence
aucuguaauaaucauuguuaag

SEQ ID NO: 8966 - RNA, 22 nt, Artificial Sequence
  Synthesized RNAi sequence
aucuguagaugcuaugucacga

SEQ ID NO: 8967 - RNA, 22 nt, Artificial Sequence
  Synthesized RNAi sequence
aucuuucacaagugccgugccu

SEQ ID NO: 8968 - RNA, 22 nt, Artificial Sequence
  Synthesized RNAi sequence
augaacagguguuauuaaauag

SEQ ID NO: 8969 - RNA, 22 nt, Artificial Sequence
  Synthesized RNAi sequence
augacaacaagcagcuucucug

SEQ ID NO: 8970 - RNA, 22 nt, Artificial Sequence
  Synthesized RNAi sequence
augacaugaacagguguuauua

SEQ ID NO: 8971 - RNA, 22 nt, Artificial Sequence
  Synthesized RNAi sequence
augacugcagcaaucaaugggc

SEQ ID NO: 8972 - RNA, 22 nt, Artificial Sequence
  Synthesized RNAi sequence
augacuguauucaccaaaagcu

SEQ ID NO: 8973 - RNA, 22 nt, Artificial Sequence
  Synthesized RNAi sequence
augagcacauaacgugugucag

SEQ ID NO: 8974 - RNA, 22 nt, Artificial Sequence
  Synthesized RNAi sequence
augaguaaacugguguuaaaca

SEQ ID NO: 8975 - RNA, 22 nt, Artificial Sequence
  Synthesized RNAi sequence
augauuucacuugaaaagucag

SEQ ID NO: 8976 - RNA, 22 nt, Artificial Sequence
  Synthesized RNAi sequence
augcuaugucacgagugacacc

SEQ ID NO: 8977 - RNA, 22 nt, Artificial Sequence
  Synthesized RNAi sequence
augcugauauguccaaagcacc

SEQ ID NO: 8978 - RNA, 22 nt, Artificial Sequence
  Synthesized RNAi sequence
augggcaagcuuugucauuagu

SEQ ID NO: 8979 - RNA, 22 nt, Artificial Sequence
  Synthesized RNAi sequence
augucaaguacaaguaaauaac

SEQ ID NO: 8980 - RNA, 22 nt, Artificial Sequence
  Synthesized RNAi sequence
augucacgagugacaccaccau

SEQ ID NO: 8981 - RNA, 22 nt, Artificial Sequence
  Synthesized RNAi sequence
auguccaaagcaccaauagguu

SEQ ID NO: 8982 - RNA, 22 nt, Artificial Sequence
  Synthesized RNAi sequence
augugucaaaaucagcauguuu

SEQ ID NO: 8983 - RNA, 22 nt, Artificial Sequence
  Synthesized RNAi sequence
auguuuagacaugacaugaaca

SEQ ID NO: 8984 - RNA, 22 nt, Artificial Sequence
  Synthesized RNAi sequence
auguuuguuagcaaaacaagua

SEQ ID NO: 8985 - RNA, 22 nt, Artificial Sequence
  Synthesized RNAi sequence
auuaaagacuacacgucucuuu

SEQ ID NO: 8986 - RNA, 22 nt, Artificial Sequence
  Synthesized RNAi sequence
auuaaaggcaacuacaugacug

SEQ ID NO: 8987 - RNA, 22 nt, Artificial Sequence
  Synthesized RNAi sequence
auuacuaaagaaccaauagaaa

SEQ ID NO: 8988 - RNA, 22 nt, Artificial Sequence
  Synthesized RNAi sequence
auuaguaaguaaauuuacagca

SEQ ID NO: 8989 - RNA, 22 nt, Artificial Sequence
  Synthesized RNAi sequence
auuagugguguaaacauauuag

SEQ ID NO: 8990 - RNA, 22 nt, Artificial Sequence
  Synthesized RNAi sequence
auuauaaagagcuaaguaucua

SEQ ID NO: 8991 - RNA, 22 nt, Artificial Sequence
  Synthesized RNAi sequence
auuauauugcguaagagguaau

SEQ ID NO: 8992 - RNA, 22 nt, Artificial Sequence
  Synthesized RNAi sequence
auucaccaaaagcucuucuaaa

SEQ ID NO: 8993 - RNA, 22 nt, Artificial Sequence
  Synthesized RNAi sequence
auugaauaauagagccauccau

SEQ ID NO: 8994 - RNA, 22 nt, Artificial Sequence
  Synthesized RNAi sequence
auugagagccuuugcgagauga

SEQ ID NO: 8995 - RNA, 22 nt, Artificial Sequence
  Synthesized RNAi sequence
auugcguaagagguaauagcac

SEQ ID NO: 8996 - RNA, 22 nt, Artificial Sequence
  Synthesized RNAi sequence
auugcuccacuaaaauacuugu

SEQ ID NO: 8997 - RNA, 22 nt, Artificial Sequence
  Synthesized RNAi sequence
auugguaucauaacaauauggu

SEQ ID NO: 8998 - RNA, 22 nt, Artificial Sequence
  Synthesized RNAi sequence
auuguuaaguacccaucuacca

SEQ ID NO: 8999 - RNA, 22 nt, Artificial Sequence
  Synthesized RNAi sequence
auuuacagcaucuacaccacag

SEQ ID NO: 9000 - RNA, 22 nt, Artificial Sequence
  Synthesized RNAi sequence
auuucacuugaaaagucaguau

SEQ ID NO: 9001 - RNA, 22 nt, Artificial Sequence
  Synthesized RNAi sequence
uaaaauaguaggcaaggcaugu

SEQ ID NO: 9002 - RNA, 22 nt, Artificial Sequence
  Synthesized RNAi sequence
uaaaaugucaaguacaaguaaa

SEQ ID NO: 9003 - RNA, 22 nt, Artificial Sequence
  Synthesized RNAi sequence
uaaacaccagguaagaaugagu

SEQ ID NO: 9004 - RNA, 22 nt, Artificial Sequence
  Synthesized RNAi sequence
uaaaccaugugucaaaaucagc

SEQ ID NO: 9005 - RNA, 22 nt, Artificial Sequence
  Synthesized RNAi sequence
uaaaccucauaaaauaguaggc

SEQ ID NO: 9006 - RNA, 22 nt, Artificial Sequence
  Synthesized RNAi sequence
uaaacugguguuaaacagagua

SEQ ID NO: 9007 - RNA, 22 nt, Artificial Sequence
  Synthesized RNAi sequence
uaaacuuucauaagcaacagaa

SEQ ID NO: 9008 - RNA, 22 nt, Artificial Sequence
  Synthesized RNAi sequence
uaaagaaccaauagaaaugcuu

SEQ ID NO: 9009 - RNA, 22 nt, Artificial Sequence
  Synthesized RNAi sequence
uaaagacuacacgucucuuuag

SEQ ID NO: 9010 - RNA, 22 nt, Artificial Sequence
  Synthesized RNAi sequence
uaaagagcuaaguaucuauuau

SEQ ID NO: 9011 - RNA, 22 nt, Artificial Sequence
  Synthesized RNAi sequence
uaaaggaaacaccauuaaagac

SEQ ID NO: 9012 - RNA, 22 nt, Artificial Sequence
  Synthesized RNAi sequence
uaaaggcaacuacaugacugua

SEQ ID NO: 9013 - RNA, 22 nt, Artificial Sequence
  Synthesized RNAi sequence
uaaaggugugaacauaaccauc

SEQ ID NO: 9014 - RNA, 22 nt, Artificial Sequence
  Synthesized RNAi sequence
uaaaguauuaaaggcaacuaca

SEQ ID NO: 9015 - RNA, 22 nt, Artificial Sequence
  Synthesized RNAi sequence
uaaauaacagaauaaacaccag

SEQ ID NO: 9016 - RNA, 22 nt, Artificial Sequence
  Synthesized RNAi sequence
uaaauuuacagcaucuacacca

SEQ ID NO: 9017 - RNA, 22 nt, Artificial Sequence
  Synthesized RNAi sequence
uaacaauaugguacuggcuuac

SEQ ID NO: 9018 - RNA, 22 nt, Artificial Sequence
  Synthesized RNAi sequence
uaacagaaccuucaagguaggu

SEQ ID NO: 9019 - RNA, 22 nt, Artificial Sequence
  Synthesized RNAi sequence
uaacagaauaaacaccagguaa

SEQ ID NO: 9020 - RNA, 22 nt, Artificial Sequence
  Synthesized RNAi sequence
uaacgugugucagggcguaaac

SEQ ID NO: 9021 - RNA, 22 nt, Artificial Sequence
  Synthesized RNAi sequence
uaacuuuaauuaacugcuucaa

SEQ ID NO: 9022 - RNA, 22 nt, Artificial Sequence
  Synthesized RNAi sequence
uaagaaugaguaaacugguguu

SEQ ID NO: 9023 - RNA, 22 nt, Artificial Sequence
  Synthesized RNAi sequence
uaagagguaauagcacaucacu

SEQ ID NO: 9024 - RNA, 22 nt, Artificial Sequence
  Synthesized RNAi sequence
uaaggaauaguaaaguauuaaa

SEQ ID NO: 9025 - RNA, 22 nt, Artificial Sequence
  Synthesized RNAi sequence
uaaguaaauuuacagcaucuac

SEQ ID NO: 9026 - RNA, 22 nt, Artificial Sequence
  Synthesized RNAi sequence
uaaguacccaucuaccacuagu

SEQ ID NO: 9027 - RNA, 22 nt, Artificial Sequence
  Synthesized RNAi sequence
uaaguaucuauuauauugcgua

SEQ ID NO: 9028 - RNA, 22 nt, Artificial Sequence
  Synthesized RNAi sequence
uaaguuuugaugguguguaaca

SEQ ID NO: 9029 - RNA, 22 nt, Artificial Sequence
  Synthesized RNAi sequence
uaauaaucauuguuaaguaccc

SEQ ID NO: 9030 - RNA, 22 nt, Artificial Sequence
  Synthesized RNAi sequence
uaauagagccauccaugagcac

SEQ ID NO: 9031 - RNA, 22 nt, Artificial Sequence
  Synthesized RNAi sequence
uaauagcacaucacuacgcaac

SEQ ID NO: 9032 - RNA, 22 nt, Artificial Sequence
  Synthesized RNAi sequence
uaauaucgugccaggcaaacca

SEQ ID NO: 9033 - RNA, 22 nt, Artificial Sequence
  Synthesized RNAi sequence
uaaucauuguuaaguacccauc

SEQ ID NO: 9034 - RNA, 22 nt, Artificial Sequence
  Synthesized RNAi sequence
uaauuacuaaagaaccaauaga

SEQ ID NO: 9035 - RNA, 22 nt, Artificial Sequence
  Synthesized RNAi sequence
uacaaguaaauaacagaauaaa

SEQ ID NO: 9036 - RNA, 22 nt, Artificial Sequence
  Synthesized RNAi sequence
uacaauaccaccagcuacuaua

SEQ ID NO: 9037 - RNA, 22 nt, Artificial Sequence
  Synthesized RNAi sequence
uacaccacagaaaacuccuggu

SEQ ID NO: 9038 - RNA, 22 nt, Artificial Sequence
  Synthesized RNAi sequence
uacacgucucuuuagguaauua

SEQ ID NO: 9039 - RNA, 22 nt, Artificial Sequence
  Synthesized RNAi sequence
uacaguacucagaaucaaaagu

SEQ ID NO: 9040 - RNA, 22 nt, Artificial Sequence
  Synthesized RNAi sequence
uacagugaaugacauaaggaau

SEQ ID NO: 9041 - RNA, 22 nt, Artificial Sequence
  Synthesized RNAi sequence
uacaugacuguauucaccaaaa

SEQ ID NO: 9042 - RNA, 22 nt, Artificial Sequence
  Synthesized RNAi sequence
uacauugguaucauaacaauau

SEQ ID NO: 9043 - RNA, 22 nt, Artificial Sequence
  Synthesized RNAi sequence
uaccaccacgcuggcuaaacca

SEQ ID NO: 9044 - RNA, 22 nt, Artificial Sequence
  Synthesized RNAi sequence
uaccaccagcuacuauagaugc

SEQ ID NO: 9045 - RNA, 22 nt, Artificial Sequence
  Synthesized RNAi sequence
uaccacuaguagauacacaaac

SEQ ID NO: 9046 - RNA, 22 nt, Artificial Sequence
  Synthesized RNAi sequence
uaccacucuaacagaaccuuca

SEQ ID NO: 9047 - RNA, 22 nt, Artificial Sequence
  Synthesized RNAi sequence
uacccaucuaccacuaguagau

SEQ ID NO: 9048 - RNA, 22 nt, Artificial Sequence
  Synthesized RNAi sequence
uacgauagcuacaauaccacca

SEQ ID NO: 9049 - RNA, 22 nt, Artificial Sequence
  Synthesized RNAi sequence
uacuaaagaaccaauagaaaug

SEQ ID NO: 9050 - RNA, 22 nt, Artificial Sequence
  Synthesized RNAi sequence
uacuaaaggaaacaccauuaaa

SEQ ID NO: 9051 - RNA, 22 nt, Artificial Sequence
  Synthesized RNAi sequence
uacuaaaggugugaacauaacc

SEQ ID NO: 9052 - RNA, 22 nt, Artificial Sequence
  Synthesized RNAi sequence
uacuacgauagcuacaauacca

SEQ ID NO: 9053 - RNA, 22 nt, Artificial Sequence
  Synthesized RNAi sequence
uacuauagaugcugauaugucc

SEQ ID NO: 9054 - RNA, 22 nt, Artificial Sequence
  Synthesized RNAi sequence
uacucagaaucaaaaguuguua

SEQ ID NO: 9055 - RNA, 22 nt, Artificial Sequence
  Synthesized RNAi sequence
uacucuauaaguuuugauggug

SEQ ID NO: 9056 - RNA, 22 nt, Artificial Sequence
  Synthesized RNAi sequence
uacugaagucauugagagccuu

SEQ ID NO: 9057 - RNA, 22 nt, Artificial Sequence
  Synthesized RNAi sequence
uacuuauuauaaagagcuaagu

SEQ ID NO: 9058 - RNA, 22 nt, Artificial Sequence
  Synthesized RNAi sequence
uacuuguacuuauuauaaagag

SEQ ID NO: 9059 - RNA, 22 nt, Artificial Sequence
  Synthesized RNAi sequence
uagaaaugcuuuguggaaauac

SEQ ID NO: 9060 - RNA, 22 nt, Artificial Sequence
  Synthesized RNAi sequence
uagagccauccaugagcacaua

SEQ ID NO: 9061 - RNA, 22 nt, Artificial Sequence
  Synthesized RNAi sequence
uagagguuuguggugguuggua

SEQ ID NO: 9062 - RNA, 22 nt, Artificial Sequence
  Synthesized RNAi sequence
uagauacacaaacaccagcuuc

SEQ ID NO: 9063 - RNA, 22 nt, Artificial Sequence
  Synthesized RNAi sequence
uagaugcuaugucacgagugac

SEQ ID NO: 9064 - RNA, 22 nt, Artificial Sequence
  Synthesized RNAi sequence
uagaugcugauauguccaaagc

SEQ ID NO: 9065 - RNA, 22 nt, Artificial Sequence
  Synthesized RNAi sequence
uagcaaaacaaguaucuguaga

SEQ ID NO: 9066 - RNA, 22 nt, Artificial Sequence
  Synthesized RNAi sequence
uagcacaucacuacgcaacuuu

SEQ ID NO: 9067 - RNA, 22 nt, Artificial Sequence
  Synthesized RNAi sequence
uagccuuguauccuaugauuuc

SEQ ID NO: 9068 - RNA, 22 nt, Artificial Sequence
  Synthesized RNAi sequence
uagcuacaauaccaccagcuac

SEQ ID NO: 9069 - RNA, 22 nt, Artificial Sequence
  Synthesized RNAi sequence
uagcuaguuguauccauugcuc

SEQ ID NO: 9070 - RNA, 22 nt, Artificial Sequence
  Synthesized RNAi sequence
uaggaaauugaauaauagagcc

SEQ ID NO: 9071 - RNA, 22 nt, Artificial Sequence
  Synthesized RNAi sequence
uaggcaaggcauguuacuacga

SEQ ID NO: 9072 - RNA, 22 nt, Artificial Sequence
  Synthesized RNAi sequence
uagguaauuacuaaagaaccaa

SEQ ID NO: 9073 - RNA, 22 nt, Artificial Sequence
  Synthesized RNAi sequence
uagguguuaggaaauugaauaa

SEQ ID NO: 9074 - RNA, 22 nt, Artificial Sequence
  Synthesized RNAi sequence
uagguugaauuagugguguaaa

SEQ ID NO: 9075 - RNA, 22 nt, Artificial Sequence
  Synthesized RNAi sequence
uaguaaaguauuaaaggcaacu

SEQ ID NO: 9076 - RNA, 22 nt, Artificial Sequence
  Synthesized RNAi sequence
uaguacauugguaucauaacaa

SEQ ID NO: 9077 - RNA, 22 nt, Artificial Sequence
  Synthesized RNAi sequence
uaguagauacacaaacaccagc

SEQ ID NO: 9078 - RNA, 22 nt, Artificial Sequence
  Synthesized RNAi sequence
uaguaggcaaggcauguuacua

SEQ ID NO: 9079 - RNA, 22 nt, Artificial Sequence
  Synthesized RNAi sequence
uaguauaacuaccaccacgcug

SEQ ID NO: 9080 - RNA, 22 nt, Artificial Sequence
  Synthesized RNAi sequence
uagugguguaaacauauuagua

SEQ ID NO: 9081 - RNA, 22 nt, Artificial Sequence
  Synthesized RNAi sequence
uaguuguauccauugcuccacu

SEQ ID NO: 9082 - RNA, 22 nt, Artificial Sequence
  Synthesized RNAi sequence
uauaaagagcuaaguaucuauu

SEQ ID NO: 9083 - RNA, 22 nt, Artificial Sequence
  Synthesized RNAi sequence
uauaacuaccaccacgcuggcu

SEQ ID NO: 9084 - RNA, 22 nt, Artificial Sequence
  Synthesized RNAi sequence
uauaaguuuugaugguguguaa

SEQ ID NO: 9085 - RNA, 22 nt, Artificial Sequence
  Synthesized RNAi sequence
uauagaugcugauauguccaaa

SEQ ID NO: 9086 - RNA, 22 nt, Artificial Sequence
  Synthesized RNAi sequence
uauauugcguaagagguaauag

SEQ ID NO: 9087 - RNA, 22 nt, Artificial Sequence
  Synthesized RNAi sequence
uaucauaacaauaugguacugg

SEQ ID NO: 9088 - RNA, 22 nt, Artificial Sequence
  Synthesized RNAi sequence
uauccauugcuccacuaaaaua

SEQ ID NO: 9089 - RNA, 22 nt, Artificial Sequence
  Synthesized RNAi sequence
uauccuaugauuucacuugaaa

SEQ ID NO: 9090 - RNA, 22 nt, Artificial Sequence
  Synthesized RNAi sequence
uaucgugccaggcaaaccaggc

SEQ ID NO: 9091 - RNA, 22 nt, Artificial Sequence
  Synthesized RNAi sequence
uaucuguagaugcuaugucacg

SEQ ID NO: 9092 - RNA, 22 nt, Artificial Sequence
  Synthesized RNAi sequence
uaugacugcagcaaucaauggg

SEQ ID NO: 9093 - RNA, 22 nt, Artificial Sequence
  Synthesized RNAi sequence
uaugauuucacuugaaaaguca

SEQ ID NO: 9094 - RNA, 22 nt, Artificial Sequence
  Synthesized RNAi sequence
uaugucacgagugacaccacca

SEQ ID NO: 9095 - RNA, 22 nt, Artificial Sequence
  Synthesized RNAi sequence
uauguccaaagcaccaauaggu

SEQ ID NO: 9096 - RNA, 22 nt, Artificial Sequence
  Synthesized RNAi sequence
uauguuuagacaugacaugaac

SEQ ID NO: 9097 - RNA, 22 nt, Artificial Sequence
  Synthesized RNAi sequence
uauuaaaggcaacuacaugacu

SEQ ID NO: 9098 - RNA, 22 nt, Artificial Sequence
  Synthesized RNAi sequence
uauuaguaaguaaauuuacagc

SEQ ID NO: 9099 - RNA, 22 nt, Artificial Sequence
  Synthesized RNAi sequence
uauuauaaagagcuaaguaucu

SEQ ID NO: 9100 - RNA, 22 nt, Artificial Sequence
  Synthesized RNAi sequence
uauuauauugcguaagagguaa

SEQ ID NO: 9101 - RNA, 22 nt, Artificial Sequence
  Synthesized RNAi sequence
uauucaccaaaagcucuucuaa

SEQ ID NO: 9102 - RNA, 22 nt, Artificial Sequence
  Synthesized RNAi sequence
uauugcguaagagguaauagca

SEQ ID NO: 9103 - RNA, 22 nt, Artificial Sequence
  Synthesized RNAi sequence
ucaaaaguacuaaaggaaacac

SEQ ID NO: 9104 - RNA, 22 nt, Artificial Sequence
  Synthesized RNAi sequence
ucaaaaguuguuaccacucuaa

SEQ ID NO: 9105 - RNA, 22 nt, Artificial Sequence
  Synthesized RNAi sequence
ucaaaaucagcauguuuguuag

SEQ ID NO: 9106 - RNA, 22 nt, Artificial Sequence
  Synthesized RNAi sequence
ucaagguagguguuaggaaauu

SEQ ID NO: 9107 - RNA, 22 nt, Artificial Sequence
  Synthesized RNAi sequence
ucaaguacaaguaaauaacaga

SEQ ID NO: 9108 - RNA, 22 nt, Artificial Sequence
  Synthesized RNAi sequence
ucaauagccuuguauccuauga

SEQ ID NO: 9109 - RNA, 22 nt, Artificial Sequence
  Synthesized RNAi sequence
ucaaugggcaagcuuugucauu

SEQ ID NO: 9110 - RNA, 22 nt, Artificial Sequence
  Synthesized RNAi sequence
ucaccaaaagcucuucuaaacc

SEQ ID NO: 9111 - RNA, 22 nt, Artificial Sequence
  Synthesized RNAi sequence
ucacgagugacaccaccaucaa

SEQ ID NO: 9112 - RNA, 22 nt, Artificial Sequence
  Synthesized RNAi sequence
ucacuacgcaacuuuagauaca

SEQ ID NO: 9113 - RNA, 22 nt, Artificial Sequence
  Synthesized RNAi sequence
ucagaaccugaguuacugaagu

SEQ ID NO: 9114 - RNA, 22 nt, Artificial Sequence
  Synthesized RNAi sequence
ucagaaucaaaaguuguuacca

SEQ ID NO: 9115 - RNA, 22 nt, Artificial Sequence
  Synthesized RNAi sequence
ucagcauguuuguuagcaaaac

SEQ ID NO: 9116 - RNA, 22 nt, Artificial Sequence
  Synthesized RNAi sequence
ucagggcguaaacuuucauaag

SEQ ID NO: 9117 - RNA, 22 nt, Artificial Sequence
  Synthesized RNAi sequence
ucaguauguuuagacaugacau

SEQ ID NO: 9118 - RNA, 22 nt, Artificial Sequence
  Synthesized RNAi sequence
ucauaaaauaguaggcaaggca

SEQ ID NO: 9119 - RNA, 22 nt, Artificial Sequence
  Synthesized RNAi sequence
ucauaacaauaugguacuggcu

SEQ ID NO: 9120 - RNA, 22 nt, Artificial Sequence
  Synthesized RNAi sequence
ucauaagcaacagaaccuucua

SEQ ID NO: 9121 - RNA, 22 nt, Artificial Sequence
  Synthesized RNAi sequence
ucauuaguauaacuaccaccac

SEQ ID NO: 9122 - RNA, 22 nt, Artificial Sequence
  Synthesized RNAi sequence
ucauugagagccuuugcgagau

SEQ ID NO: 9123 - RNA, 22 nt, Artificial Sequence
  Synthesized RNAi sequence
ucauuguuaaguacccaucuac

SEQ ID NO: 9124 - RNA, 22 nt, Artificial Sequence
  Synthesized RNAi sequence
uccaaagcaccaauagguugaa

SEQ ID NO: 9125 - RNA, 22 nt, Artificial Sequence
  Synthesized RNAi sequence
uccacuaaaauacuuguacuua

SEQ ID NO: 9126 - RNA, 22 nt, Artificial Sequence
  Synthesized RNAi sequence
uccaugagcacauaacgugugu

SEQ ID NO: 9127 - RNA, 22 nt, Artificial Sequence
  Synthesized RNAi sequence
uccauugcuccacuaaaauacu

SEQ ID NO: 9128 - RNA, 22 nt, Artificial Sequence
  Synthesized RNAi sequence
uccuaugauuucacuugaaaag

SEQ ID NO: 9129 - RNA, 22 nt, Artificial Sequence
  Synthesized RNAi sequence
uccugguaaagaucuguaauaa

SEQ ID NO: 9130 - RNA, 22 nt, Artificial Sequence
  Synthesized RNAi sequence
ucuaaaccucauaaaauaguag

SEQ ID NO: 9131 - RNA, 22 nt, Artificial Sequence
  Synthesized RNAi sequence
ucuaacagaaccuucaagguag

SEQ ID NO: 9132 - RNA, 22 nt, Artificial Sequence
  Synthesized RNAi sequence
ucuacaccacagaaaacuccug

SEQ ID NO: 9133 - RNA, 22 nt, Artificial Sequence
  Synthesized RNAi sequence
ucuaccacuaguagauacacaa

SEQ ID NO: 9134 - RNA, 22 nt, Artificial Sequence
  Synthesized RNAi sequence
ucuaguacauugguaucauaac

SEQ ID NO: 9135 - RNA, 22 nt, Artificial Sequence
  Synthesized RNAi sequence
ucuauaaguuuugauggugugu

SEQ ID NO: 9136 - RNA, 22 nt, Artificial Sequence
  Synthesized RNAi sequence
ucuauuauauugcguaagaggu

SEQ ID NO: 9137 - RNA, 22 nt, Artificial Sequence
  Synthesized RNAi sequence
ucucuuguuaugacugcagcaa

SEQ ID NO: 9138 - RNA, 22 nt, Artificial Sequence
  Synthesized RNAi sequence
ucucuuuagguaauuacuaaag

SEQ ID NO: 9139 - RNA, 22 nt, Artificial Sequence
  Synthesized RNAi sequence
ucugaucuuucacaagugccgu

SEQ ID NO: 9140 - RNA, 22 nt, Artificial Sequence
  Synthesized RNAi sequence
ucuguaauaaucauuguuaagu

SEQ ID NO: 9141 - RNA, 22 nt, Artificial Sequence
  Synthesized RNAi sequence
ucuguagaugcuaugucacgag

SEQ ID NO: 9142 - RNA, 22 nt, Artificial Sequence
  Synthesized RNAi sequence
ucuguagcuaguuguauccauu

SEQ ID NO: 9143 - RNA, 22 nt, Artificial Sequence
  Synthesized RNAi sequence
ucuucaaaaguacuaaaggaaa

SEQ ID NO: 9144 - RNA, 22 nt, Artificial Sequence
  Synthesized RNAi sequence
ucuucuaaaccucauaaaauag

SEQ ID NO: 9145 - RNA, 22 nt, Artificial Sequence
  Synthesized RNAi sequence
ucuuguuaugacugcagcaauc

SEQ ID NO: 9146 - RNA, 22 nt, Artificial Sequence
  Synthesized RNAi sequence
ucuuuagguaauuacuaaagaa

SEQ ID NO: 9147 - RNA, 22 nt, Artificial Sequence
  Synthesized RNAi sequence
ucuuucacaagugccgugccua

SEQ ID NO: 9148 - RNA, 22 nt, Artificial Sequence
  Synthesized RNAi sequence
ugaaaagucaguauguuuagac

SEQ ID NO: 9149 - RNA, 22 nt, Artificial Sequence
  Synthesized RNAi sequence
ugaacagguguuauuaaauaga

SEQ ID NO: 9150 - RNA, 22 nt, Artificial Sequence
  Synthesized RNAi sequence
ugaagucauugagagccuuugc

SEQ ID NO: 9151 - RNA, 22 nt, Artificial Sequence
  Synthesized RNAi sequence
ugaauaauagagccauccauga

SEQ ID NO: 9152 - RNA, 22 nt, Artificial Sequence
  Synthesized RNAi sequence
ugaaugacauaaggaauaguaa

SEQ ID NO: 9153 - RNA, 22 nt, Artificial Sequence
  Synthesized RNAi sequence
ugaauuagugguguaaacauau

SEQ ID NO: 9154 - RNA, 22 nt, Artificial Sequence
  Synthesized RNAi sequence
ugacaacaagcagcuucucugu

SEQ ID NO: 9155 - RNA, 22 nt, Artificial Sequence
  Synthesized RNAi sequence
ugacaccaccaucaauagccuu

SEQ ID NO: 9156 - RNA, 22 nt, Artificial Sequence
  Synthesized RNAi sequence
ugacaugaacagguguuauuaa

SEQ ID NO: 9157 - RNA, 22 nt, Artificial Sequence
  Synthesized RNAi sequence
ugacugcagcaaucaaugggca

SEQ ID NO: 9158 - RNA, 22 nt, Artificial Sequence
  Synthesized RNAi sequence
ugacuguauucaccaaaagcuc

SEQ ID NO: 9159 - RNA, 22 nt, Artificial Sequence
  Synthesized RNAi sequence
ugagagccuuugcgagaugaca

SEQ ID NO: 9160 - RNA, 22 nt, Artificial Sequence
  Synthesized RNAi sequence
ugagcacauaacgugugucagg

SEQ ID NO: 9161 - RNA, 22 nt, Artificial Sequence
  Synthesized RNAi sequence
ugaggugauagagguuuguggu

SEQ ID NO: 9162 - RNA, 22 nt, Artificial Sequence
  Synthesized RNAi sequence
ugaguaaacugguguuaaacag

SEQ ID NO: 9163 - RNA, 22 nt, Artificial Sequence
  Synthesized RNAi sequence
ugaguuacugaagucauugaga

SEQ ID NO: 9164 - RNA, 22 nt, Artificial Sequence
  Synthesized RNAi sequence
ugauagagguuuguggugguug

SEQ ID NO: 9165 - RNA, 22 nt, Artificial Sequence
  Synthesized RNAi sequence
ugauauguccaaagcaccaaua

SEQ ID NO: 9166 - RNA, 22 nt, Artificial Sequence
  Synthesized RNAi sequence
ugaucuuucacaagugccgugc

SEQ ID NO: 9167 - RNA, 22 nt, Artificial Sequence
  Synthesized RNAi sequence
ugaugguguguaacagauguua

SEQ ID NO: 9168 - RNA, 22 nt, Artificial Sequence
  Synthesized RNAi sequence
ugauguugcaaagucaguguac

SEQ ID NO: 9169 - RNA, 22 nt, Artificial Sequence
  Synthesized RNAi sequence
ugauuucacuugaaaagucagu

SEQ ID NO: 9170 - RNA, 22 nt, Artificial Sequence
  Synthesized RNAi sequence
ugcaaagucaguguacucuaua

SEQ ID NO: 9171 - RNA, 22 nt, Artificial Sequence
  Synthesized RNAi sequence
ugcagcaaucaaugggcaagcu

SEQ ID NO: 9172 - RNA, 22 nt, Artificial Sequence
  Synthesized RNAi sequence
ugccgugccuacaguacucaga

SEQ ID NO: 9173 - RNA, 22 nt, Artificial Sequence
  Synthesized RNAi sequence
ugccuacaguacucagaaucaa

SEQ ID NO: 9174 - RNA, 22 nt, Artificial Sequence
  Synthesized RNAi sequence
ugcgagaugacaacaagcagcu

SEQ ID NO: 9175 - RNA, 22 nt, Artificial Sequence
  Synthesized RNAi sequence
ugcguaagagguaauagcacau

SEQ ID NO: 9176 - RNA, 22 nt, Artificial Sequence
  Synthesized RNAi sequence
ugcguaauaucgugccaggcaa

SEQ ID NO: 9177 - RNA, 22 nt, Artificial Sequence
  Synthesized RNAi sequence
ugcuaugucacgagugacacca

SEQ ID NO: 9178 - RNA, 22 nt, Artificial Sequence
  Synthesized RNAi sequence
ugcuccacuaaaauacuuguac

SEQ ID NO: 9179 - RNA, 22 nt, Artificial Sequence
  Synthesized RNAi sequence
ugcugauauguccaaagcacca

SEQ ID NO: 9180 - RNA, 22 nt, Artificial Sequence
  Synthesized RNAi sequence
uggcuaaaccaugugucaaaau

SEQ ID NO: 9181 - RNA, 22 nt, Artificial Sequence
  Synthesized RNAi sequence
ugggcaagcuuugucauuagua

SEQ ID NO: 9182 - RNA, 22 nt, Artificial Sequence
  Synthesized RNAi sequence
ugguaaagaacaucagaaccug

SEQ ID NO: 9183 - RNA, 22 nt, Artificial Sequence
  Synthesized RNAi sequence
ugguaaagaucuguaauaauca

SEQ ID NO: 9184 - RNA, 22 nt, Artificial Sequence
  Synthesized RNAi sequence
ugguaucauaacaauaugguac

SEQ ID NO: 9185 - RNA, 22 nt, Artificial Sequence
  Synthesized RNAi sequence
uggugguugguaaagaacauca

SEQ ID NO: 9186 - RNA, 22 nt, Artificial Sequence
  Synthesized RNAi sequence
ugguguaaacauauuaguaagu

SEQ ID NO: 9187 - RNA, 22 nt, Artificial Sequence
  Synthesized RNAi sequence
ugguguuaaacagaguacagug

SEQ ID NO: 9188 - RNA, 22 nt, Artificial Sequence
  Synthesized RNAi sequence
ugguugguaaagaacaucagaa

SEQ ID NO: 9189 - RNA, 22 nt, Artificial Sequence
  Synthesized RNAi sequence
uguaaacauauuaguaaguaaa

SEQ ID NO: 9190 - RNA, 22 nt, Artificial Sequence
  Synthesized RNAi sequence
uguaacuuuaauuaacugcuuc

SEQ ID NO: 9191 - RNA, 22 nt, Artificial Sequence
  Synthesized RNAi sequence
uguaauaaucauuguuaaguac

SEQ ID NO: 9192 - RNA, 22 nt, Artificial Sequence
  Synthesized RNAi sequence
uguacucuauaaguuuugaugg

SEQ ID NO: 9193 - RNA, 22 nt, Artificial Sequence
  Synthesized RNAi sequence
uguacuuauuauaaagagcuaa

SEQ ID NO: 9194 - RNA, 22 nt, Artificial Sequence
  Synthesized RNAi sequence
uguagaugcuaugucacgagug

SEQ ID NO: 9195 - RNA, 22 nt, Artificial Sequence
  Synthesized RNAi sequence
uguagcuaguuguauccauugc

SEQ ID NO: 9196 - RNA, 22 nt, Artificial Sequence
  Synthesized RNAi sequence
uguauccauugcuccacuaaaa

SEQ ID NO: 9197 - RNA, 22 nt, Artificial Sequence
  Synthesized RNAi sequence
uguauccuaugauuucacuuga

SEQ ID NO: 9198 - RNA, 22 nt, Artificial Sequence
  Synthesized RNAi sequence
uguauucaccaaaagcucuucu

SEQ ID NO: 9199 - RNA, 22 nt, Artificial Sequence
  Synthesized RNAi sequence
ugucaaaaucagcauguuuguu

SEQ ID NO: 9200 - RNA, 22 nt, Artificial Sequence
  Synthesized RNAi sequence
ugucaaguacaaguaaauaaca

SEQ ID NO: 9201 - RNA, 22 nt, Artificial Sequence
  Synthesized RNAi sequence
ugucacgagugacaccaccauc

SEQ ID NO: 9202 - RNA, 22 nt, Artificial Sequence
  Synthesized RNAi sequence
ugucagggcguaaacuuucaua

SEQ ID NO: 9203 - RNA, 22 nt, Artificial Sequence
  Synthesized RNAi sequence
ugucauuaguauaacuaccacc

SEQ ID NO: 9204 - RNA, 22 nt, Artificial Sequence
  Synthesized RNAi sequence
uguccaaagcaccaauagguug

SEQ ID NO: 9205 - RNA, 22 nt, Artificial Sequence
  Synthesized RNAi sequence
ugugcguaauaucgugccaggc

SEQ ID NO: 9206 - RNA, 22 nt, Artificial Sequence
  Synthesized RNAi sequence
uguggugguugguaaagaacau

SEQ ID NO: 9207 - RNA, 22 nt, Artificial Sequence
  Synthesized RNAi sequence
ugugucagggcguaaacuuuca

SEQ ID NO: 9208 - RNA, 22 nt, Artificial Sequence
  Synthesized RNAi sequence
uguuaaacagaguacagugaau

SEQ ID NO: 9209 - RNA, 22 nt, Artificial Sequence
  Synthesized RNAi sequence
uguuaaguacccaucuaccacu

SEQ ID NO: 9210 - RNA, 22 nt, Artificial Sequence
  Synthesized RNAi sequence
uguuaccacucuaacagaaccu

SEQ ID NO: 9211 - RNA, 22 nt, Artificial Sequence
  Synthesized RNAi sequence
uguuacuacgauagcuacaaua

SEQ ID NO: 9212 - RNA, 22 nt, Artificial Sequence
  Synthesized RNAi sequence
uguuagcaaaacaaguaucugu

SEQ ID NO: 9213 - RNA, 22 nt, Artificial Sequence
  Synthesized RNAi sequence
uguugcaaagucaguguacucu

SEQ ID NO: 9214 - RNA, 22 nt, Artificial Sequence
  Synthesized RNAi sequence
uguuuagacaugacaugaacag

SEQ ID NO: 9215 - RNA, 22 nt, Artificial Sequence
  Synthesized RNAi sequence
uguuuguuagcaaaacaaguau

SEQ ID NO: 9216 - RNA, 22 nt, Artificial Sequence
  Synthesized RNAi sequence
uuaaacagaguacagugaauga

SEQ ID NO: 9217 - RNA, 22 nt, Artificial Sequence
  Synthesized RNAi sequence
uuaaagacuacacgucucuuua

SEQ ID NO: 9218 - RNA, 22 nt, Artificial Sequence
  Synthesized RNAi sequence
uuaaaggcaacuacaugacugu

SEQ ID NO: 9219 - RNA, 22 nt, Artificial Sequence
  Synthesized RNAi sequence
uuaaguacccaucuaccacuag

SEQ ID NO: 9220 - RNA, 22 nt, Artificial Sequence
  Synthesized RNAi sequence
uuaccacucuaacagaaccuuc

SEQ ID NO: 9221 - RNA, 22 nt, Artificial Sequence
  Synthesized RNAi sequence
uuacuaaagaaccaauagaaau

SEQ ID NO: 9222 - RNA, 22 nt, Artificial Sequence
  Synthesized RNAi sequence
uuacuacgauagcuacaauacc

SEQ ID NO: 9223 - RNA, 22 nt, Artificial Sequence
  Synthesized RNAi sequence
uuacugaagucauugagagccu

SEQ ID NO: 9224 - RNA, 22 nt, Artificial Sequence
  Synthesized RNAi sequence
uuagacaugacaugaacaggug

SEQ ID NO: 9225 - RNA, 22 nt, Artificial Sequence
  Synthesized RNAi sequence
uuagcaaaacaaguaucuguag

SEQ ID NO: 9226 - RNA, 22 nt, Artificial Sequence
  Synthesized RNAi sequence
uuaggaaauugaauaauagagc

SEQ ID NO: 9227 - RNA, 22 nt, Artificial Sequence
  Synthesized RNAi sequence
uuagguaauuacuaaagaacca

SEQ ID NO: 9228 - RNA, 22 nt, Artificial Sequence
  Synthesized RNAi sequence
uuaguaaguaaauuuacagcau

SEQ ID NO: 9229 - RNA, 22 nt, Artificial Sequence
  Synthesized RNAi sequence
uuaguauaacuaccaccacgcu

SEQ ID NO: 9230 - RNA, 22 nt, Artificial Sequence
  Synthesized RNAi sequence
uuagugguguaaacauauuagu

SEQ ID NO: 9231 - RNA, 22 nt, Artificial Sequence
  Synthesized RNAi sequence
uuauaaagagcuaaguaucuau

SEQ ID NO: 9232 - RNA, 22 nt, Artificial Sequence
  Synthesized RNAi sequence
uuauauugcguaagagguaaua

SEQ ID NO: 9233 - RNA, 22 nt, Artificial Sequence
  Synthesized RNAi sequence
uuaugacugcagcaaucaaugg

SEQ ID NO: 9234 - RNA, 22 nt, Artificial Sequence
  Synthesized RNAi sequence
uuauuauaaagagcuaaguauc

SEQ ID NO: 9235 - RNA, 22 nt, Artificial Sequence
  Synthesized RNAi sequence
uucaaaaguacuaaaggaaaca

SEQ ID NO: 9236 - RNA, 22 nt, Artificial Sequence
  Synthesized RNAi sequence
uucaagguagguguuaggaaau

SEQ ID NO: 9237 - RNA, 22 nt, Artificial Sequence
  Synthesized RNAi sequence
uucacaagugccgugccuacag

SEQ ID NO: 9238 - RNA, 22 nt, Artificial Sequence
  Synthesized RNAi sequence
uucaccaaaagcucuucuaaac

SEQ ID NO: 9239 - RNA, 22 nt, Artificial Sequence
  Synthesized RNAi sequence
uucauaagcaacagaaccuucu

SEQ ID NO: 9240 - RNA, 22 nt, Artificial Sequence
  Synthesized RNAi sequence
uucuaaaccucauaaaauagua

SEQ ID NO: 9241 - RNA, 22 nt, Artificial Sequence
  Synthesized RNAi sequence
uucuaguacauugguaucauaa

SEQ ID NO: 9242 - RNA, 22 nt, Artificial Sequence
  Synthesized RNAi sequence
uucucuguagcuaguuguaucc

SEQ ID NO: 9243 - RNA, 22 nt, Artificial Sequence
  Synthesized RNAi sequence
uucucuuguuaugacugcagca

SEQ ID NO: 9244 - RNA, 22 nt, Artificial Sequence
  Synthesized RNAi sequence
uucugaucuuucacaagugccg

SEQ ID NO: 9245 - RNA, 22 nt, Artificial Sequence
  Synthesized RNAi sequence
uucuucaaaaguacuaaaggaa

SEQ ID NO: 9246 - RNA, 22 nt, Artificial Sequence
  Synthesized RNAi sequence
uugaaaagucaguauguuuaga

SEQ ID NO: 9247 - RNA, 22 nt, Artificial Sequence
  Synthesized RNAi sequence
uugaauaauagagccauccaug

SEQ ID NO: 9248 - RNA, 22 nt, Artificial Sequence
  Synthesized RNAi sequence
uugagagccuuugcgagaugac

SEQ ID NO: 9249 - RNA, 22 nt, Artificial Sequence
  Synthesized RNAi sequence
uugaugguguguaacagauguu

SEQ ID NO: 9250 - RNA, 22 nt, Artificial Sequence
  Synthesized RNAi sequence
uugcaaagucaguguacucuau

SEQ ID NO: 9251 - RNA, 22 nt, Artificial Sequence
  Synthesized RNAi sequence
uugcgagaugacaacaagcagc

SEQ ID NO: 9252 - RNA, 22 nt, Artificial Sequence
  Synthesized RNAi sequence
uugcguaagagguaauagcaca

SEQ ID NO: 9253 - RNA, 22 nt, Artificial Sequence
  Synthesized RNAi sequence
uugcuccacuaaaauacuugua

SEQ ID NO: 9254 - RNA, 22 nt, Artificial Sequence
  Synthesized RNAi sequence
uugguaaagaacaucagaaccu

SEQ ID NO: 9255 - RNA, 22 nt, Artificial Sequence
  Synthesized RNAi sequence
uugguaucauaacaauauggua

SEQ ID NO: 9256 - RNA, 22 nt, Artificial Sequence
  Synthesized RNAi sequence
uuguacuuauuauaaagagcua

SEQ ID NO: 9257 - RNA, 22 nt, Artificial Sequence
  Synthesized RNAi sequence
uuguauccauugcuccacuaaa

SEQ ID NO: 9258 - RNA, 22 nt, Artificial Sequence
  Synthesized RNAi sequence
uuguauccuaugauuucacuug

SEQ ID NO: 9259 - RNA, 22 nt, Artificial Sequence
  Synthesized RNAi sequence
uugucauuaguauaacuaccac

SEQ ID NO: 9260 - RNA, 22 nt, Artificial Sequence
  Synthesized RNAi sequence
uugugcguaauaucgugccagg

SEQ ID NO: 9261 - RNA, 22 nt, Artificial Sequence
  Synthesized RNAi sequence
uuguggugguugguaaagaaca

SEQ ID NO: 9262 - RNA, 22 nt, Artificial Sequence
  Synthesized RNAi sequence
uuguuaaguacccaucuaccac

SEQ ID NO: 9263 - RNA, 22 nt, Artificial Sequence
  Synthesized RNAi sequence
uuguuaccacucuaacagaacc

SEQ ID NO: 9264 - RNA, 22 nt, Artificial Sequence
  Synthesized RNAi sequence
uuguuagcaaaacaaguaucug

SEQ ID NO: 9265 - RNA, 22 nt, Artificial Sequence
  Synthesized RNAi sequence
uuguuaugacugcagcaaucaa

SEQ ID NO: 9266 - RNA, 22 nt, Artificial Sequence
  Synthesized RNAi sequence
uuuaauuaacugcuucaaccaa

SEQ ID NO: 9267 - RNA, 22 nt, Artificial Sequence
  Synthesized RNAi sequence
uuuagacaugacaugaacaggu

SEQ ID NO: 9268 - RNA, 22 nt, Artificial Sequence
  Synthesized RNAi sequence
uuucacaagugccgugccuaca

SEQ ID NO: 9269 - RNA, 22 nt, Artificial Sequence
  Synthesized RNAi sequence
uuucacuugaaaagucaguaug

SEQ ID NO: 9270 - RNA, 22 nt, Artificial Sequence
  Synthesized RNAi sequence
uuucauaagcaacagaaccuuc

SEQ ID NO: 9271 - RNA, 22 nt, Artificial Sequence
  Synthesized RNAi sequence
uuugaugguguguaacagaugu

SEQ ID NO: 9272 - RNA, 22 nt, Artificial Sequence
  Synthesized RNAi sequence
uuugcgagaugacaacaagcag

SEQ ID NO: 9273 - RNA, 22 nt, Artificial Sequence
  Synthesized RNAi sequence
uuugucauuaguauaacuacca

SEQ ID NO: 9274 - RNA, 22 nt, Artificial Sequence
  Synthesized RNAi sequence
uuuguggugguugguaaagaac

SEQ ID NO: 9275 - RNA, 22 nt, Artificial Sequence
  Synthesized RNAi sequence
uuuguuagcaaaacaaguaucu

SEQ ID NO: 9276 - RNA, 22 nt, Artificial Sequence
  Synthesized RNAi sequence
uuuugaugguguguaacagaug

SEQ ID NO: 9277 - RNA, 22 nt, Artificial Sequence
  Synthesized RNAi sequence
aaacaccaagagucagucuaaa

SEQ ID NO: 9278 - RNA, 22 nt, Artificial Sequence
  Synthesized RNAi sequence
aaacaucauugcaaaagcagac

SEQ ID NO: 9279 - RNA, 22 nt, Artificial Sequence
  Synthesized RNAi sequence
aaaccagacaaacuaguaucaa

SEQ ID NO: 9280 - RNA, 22 nt, Artificial Sequence
  Synthesized RNAi sequence
aaacgagugucaagacauucau

SEQ ID NO: 9281 - RNA, 22 nt, Artificial Sequence
  Synthesized RNAi sequence
aaacuaaaagugaagucaaaau

SEQ ID NO: 9282 - RNA, 22 nt, Artificial Sequence
  Synthesized RNAi sequence
aaacuaaguaaucauaaacacc

SEQ ID NO: 9283 - RNA, 22 nt, Artificial Sequence
  Synthesized RNAi sequence
aaacuagcauuauacacugaag

SEQ ID NO: 9284 - RNA, 22 nt, Artificial Sequence
  Synthesized RNAi sequence
aaacuaguaucaaccauaucca

SEQ ID NO: 9285 - RNA, 22 nt, Artificial Sequence
  Synthesized RNAi sequence
aaacuuuauaaacgagugucaa

SEQ ID NO: 9286 - RNA, 22 nt, Artificial Sequence
  Synthesized RNAi sequence
aaagcagacauagcaauaauac

SEQ ID NO: 9287 - RNA, 22 nt, Artificial Sequence
  Synthesized RNAi sequence
aaagcauuaccauaauaaacuu

SEQ ID NO: 9288 - RNA, 22 nt, Artificial Sequence
  Synthesized RNAi sequence
aaaguagcgguugaguaaacaa

SEQ ID NO: 9289 - RNA, 22 nt, Artificial Sequence
  Synthesized RNAi sequence
aaagugaagucaaaauugugag

SEQ ID NO: 9290 - RNA, 22 nt, Artificial Sequence
  Synthesized RNAi sequence
aaauggcuugaucuaaagcauu

SEQ ID NO: 9291 - RNA, 22 nt, Artificial Sequence
  Synthesized RNAi sequence
aaauugugaguaacaaccagug

SEQ ID NO: 9292 - RNA, 22 nt, Artificial Sequence
  Synthesized RNAi sequence
aacaaccagugguguguacccu

SEQ ID NO: 9293 - RNA, 22 nt, Artificial Sequence
  Synthesized RNAi sequence
aacaauaaacuagcauuauaca

SEQ ID NO: 9294 - RNA, 22 nt, Artificial Sequence
  Synthesized RNAi sequence
aacaauuuaauguugaguuuga

SEQ ID NO: 9295 - RNA, 22 nt, Artificial Sequence
  Synthesized RNAi sequence
aacaccaagagucagucuaaag

SEQ ID NO: 9296 - RNA, 22 nt, Artificial Sequence
  Synthesized RNAi sequence
aacacccaacaauuuaauguug

SEQ ID NO: 9297 - RNA, 22 nt, Artificial Sequence
  Synthesized RNAi sequence
aacacuacagcugaugcauaca

SEQ ID NO: 9298 - RNA, 22 nt, Artificial Sequence
  Synthesized RNAi sequence
aacagagauuauaagagcccac

SEQ ID NO: 9299 - RNA, 22 nt, Artificial Sequence
  Synthesized RNAi sequence
aacaucauugcaaaagcagaca

SEQ ID NO: 9300 - RNA, 22 nt, Artificial Sequence
  Synthesized RNAi sequence
aaccagacaaacuaguaucaac

SEQ ID NO: 9301 - RNA, 22 nt, Artificial Sequence
  Synthesized RNAi sequence
aaccagugguguguacccuuga

SEQ ID NO: 9302 - RNA, 22 nt, Artificial Sequence
  Synthesized RNAi sequence
aaccauauccaaccaugucaua

SEQ ID NO: 9303 - RNA, 22 nt, Artificial Sequence
  Synthesized RNAi sequence
aaccaugucauaauacgcauca

SEQ ID NO: 9304 - RNA, 22 nt, Artificial Sequence
  Synthesized RNAi sequence
aacgagugucaagacauucaua

SEQ ID NO: 9305 - RNA, 22 nt, Artificial Sequence
  Synthesized RNAi sequence
aacuaaaagugaagucaaaauu

SEQ ID NO: 9306 - RNA, 22 nt, Artificial Sequence
  Synthesized RNAi sequence
aacuaaguaaucauaaacacca

SEQ ID NO: 9307 - RNA, 22 nt, Artificial Sequence
  Synthesized RNAi sequence
aacuacaccugaguaguuagaa

SEQ ID NO: 9308 - RNA, 22 nt, Artificial Sequence
  Synthesized RNAi sequence
aacuagcaggcauauagaccau

SEQ ID NO: 9309 - RNA, 22 nt, Artificial Sequence
  Synthesized RNAi sequence
aacuagcauuauacacugaagu

SEQ ID NO: 9310 - RNA, 22 nt, Artificial Sequence
  Synthesized RNAi sequence
aacuaguaucaaccauauccaa

SEQ ID NO: 9311 - RNA, 22 nt, Artificial Sequence
  Synthesized RNAi sequence
aacuuuauaaacgagugucaag

SEQ ID NO: 9312 - RNA, 22 nt, Artificial Sequence
  Synthesized RNAi sequence
aagacauucauaaguguccaca

SEQ ID NO: 9313 - RNA, 22 nt, Artificial Sequence
  Synthesized RNAi sequence
aagagcccacauggaaauggcu

SEQ ID NO: 9314 - RNA, 22 nt, Artificial Sequence
  Synthesized RNAi sequence
aagcagacauagcaauaauacc

SEQ ID NO: 9315 - RNA, 22 nt, Artificial Sequence
  Synthesized RNAi sequence
aagcauuaccauaauaaacuuu

SEQ ID NO: 9316 - RNA, 22 nt, Artificial Sequence
  Synthesized RNAi sequence
aaggauuaguaacacuacagcu

SEQ ID NO: 9317 - RNA, 22 nt, Artificial Sequence
  Synthesized RNAi sequence
aaggcaucuaugcuauucuugg

SEQ ID NO: 9318 - RNA, 22 nt, Artificial Sequence
  Synthesized RNAi sequence
aagguuugccaccaacacccaa

SEQ ID NO: 9319 - RNA, 22 nt, Artificial Sequence
  Synthesized RNAi sequence
aaguaaucauaaacaccaagag

SEQ ID NO: 9320 - RNA, 22 nt, Artificial Sequence
  Synthesized RNAi sequence
aaguagcgguugaguaaacaaa

SEQ ID NO: 9321 - RNA, 22 nt, Artificial Sequence
  Synthesized RNAi sequence
aagucaaaauugugaguaacaa

SEQ ID NO: 9322 - RNA, 22 nt, Artificial Sequence
  Synthesized RNAi sequence
aagugaagucaaaauugugagu

SEQ ID NO: 9323 - RNA, 22 nt, Artificial Sequence
  Synthesized RNAi sequence
aaguguauuaccaguuaugaag

SEQ ID NO: 9324 - RNA, 22 nt, Artificial Sequence
  Synthesized RNAi sequence
aaguguccacacucuccuagca

SEQ ID NO: 9325 - RNA, 22 nt, Artificial Sequence
  Synthesized RNAi sequence
aauaaacuagcauuauacacug

SEQ ID NO: 9326 - RNA, 22 nt, Artificial Sequence
  Synthesized RNAi sequence
aauaaacuuuauaaacgagugu

SEQ ID NO: 9327 - RNA, 22 nt, Artificial Sequence
  Synthesized RNAi sequence
aauacgcaucacccaacuagca

SEQ ID NO: 9328 - RNA, 22 nt, Artificial Sequence
  Synthesized RNAi sequence
aaucauaaacaccaagagucag

SEQ ID NO: 9329 - RNA, 22 nt, Artificial Sequence
  Synthesized RNAi sequence
aauggcuugaucuaaagcauua

SEQ ID NO: 9330 - RNA, 22 nt, Artificial Sequence
  Synthesized RNAi sequence
aauguugaguuugaaggcaucu

SEQ ID NO: 9331 - RNA, 22 nt, Artificial Sequence
  Synthesized RNAi sequence
aauugugaguaacaaccagugg

SEQ ID NO: 9332 - RNA, 22 nt, Artificial Sequence
  Synthesized RNAi sequence
aauuuaauguugaguuugaagg

SEQ ID NO: 9333 - RNA, 22 nt, Artificial Sequence
  Synthesized RNAi sequence
acaaacaucauugcaaaagcag

SEQ ID NO: 9334 - RNA, 22 nt, Artificial Sequence
  Synthesized RNAi sequence
acaaacuaguaucaaccauauc

SEQ ID NO: 9335 - RNA, 22 nt, Artificial Sequence
  Synthesized RNAi sequence
acaaccagugguguguacccuu

SEQ ID NO: 9336 - RNA, 22 nt, Artificial Sequence
  Synthesized RNAi sequence
acaagguuugccaccaacaccc

SEQ ID NO: 9337 - RNA, 22 nt, Artificial Sequence
  Synthesized RNAi sequence
acaauaaacuagcauuauacac

SEQ ID NO: 9338 - RNA, 22 nt, Artificial Sequence
  Synthesized RNAi sequence
acaauuuaauguugaguuugaa

SEQ ID NO: 9339 - RNA, 22 nt, Artificial Sequence
  Synthesized RNAi sequence
acacagucuuuuagcuuaaaac

SEQ ID NO: 9340 - RNA, 22 nt, Artificial Sequence
  Synthesized RNAi sequence
acacaguucuugcugucauaag

SEQ ID NO: 9341 - RNA, 22 nt, Artificial Sequence
  Synthesized RNAi sequence
acaccaagagucagucuaaagu

SEQ ID NO: 9342 - RNA, 22 nt, Artificial Sequence
  Synthesized RNAi sequence
acaccugaguaguuagaaguaa

SEQ ID NO: 9343 - RNA, 22 nt, Artificial Sequence
  Synthesized RNAi sequence
acacuacagcugaugcauacau

SEQ ID NO: 9344 - RNA, 22 nt, Artificial Sequence
  Synthesized RNAi sequence
acacucuccuagcaccaucauc

SEQ ID NO: 9345 - RNA, 22 nt, Artificial Sequence
  Synthesized RNAi sequence
acacugaaguguauuaccaguu

SEQ ID NO: 9346 - RNA, 22 nt, Artificial Sequence
  Synthesized RNAi sequence
acagagauuauaagagcccaca

SEQ ID NO: 9347 - RNA, 22 nt, Artificial Sequence
  Synthesized RNAi sequence
acagcugaugcauacauaacac

SEQ ID NO: 9348 - RNA, 22 nt, Artificial Sequence
  Synthesized RNAi sequence
acagucuuuuagcuuaaaacca

SEQ ID NO: 9349 - RNA, 22 nt, Artificial Sequence
  Synthesized RNAi sequence
acaguggcuacuuugauacaag

SEQ ID NO: 9350 - RNA, 22 nt, Artificial Sequence
  Synthesized RNAi sequence
acaguucuugcugucauaagga

SEQ ID NO: 9351 - RNA, 22 nt, Artificial Sequence
  Synthesized RNAi sequence
acauaacacagucuuuuagcuu

SEQ ID NO: 9352 - RNA, 22 nt, Artificial Sequence
  Synthesized RNAi sequence
acaucauugcaaaagcagacau

SEQ ID NO: 9353 - RNA, 22 nt, Artificial Sequence
  Synthesized RNAi sequence
acaucugacauuuuagacugua

SEQ ID NO: 9354 - RNA, 22 nt, Artificial Sequence
  Synthesized RNAi sequence
acauggaaauggcuugaucuaa

SEQ ID NO: 9355 - RNA, 22 nt, Artificial Sequence
  Synthesized RNAi sequence
acauucauaaguguccacacuc

SEQ ID NO: 9356 - RNA, 22 nt, Artificial Sequence
  Synthesized RNAi sequence
acauuuuagacuguacaguggc

SEQ ID NO: 9357 - RNA, 22 nt, Artificial Sequence
  Synthesized RNAi sequence
accaacacccaacaauuuaaug

SEQ ID NO: 9358 - RNA, 22 nt, Artificial Sequence
  Synthesized RNAi sequence
accaagagucagucuaaaguag

SEQ ID NO: 9359 - RNA, 22 nt, Artificial Sequence
  Synthesized RNAi sequence
accagacaaacuaguaucaacc

SEQ ID NO: 9360 - RNA, 22 nt, Artificial Sequence
  Synthesized RNAi sequence
accagugguguguacccuugau

SEQ ID NO: 9361 - RNA, 22 nt, Artificial Sequence
  Synthesized RNAi sequence
accaguuaugaagaaaauaggg

SEQ ID NO: 9362 - RNA, 22 nt, Artificial Sequence
  Synthesized RNAi sequence
accauaauaaacuuuauaaacg

SEQ ID NO: 9363 - RNA, 22 nt, Artificial Sequence
  Synthesized RNAi sequence
accauauccaaccaugucauaa

SEQ ID NO: 9364 - RNA, 22 nt, Artificial Sequence
  Synthesized RNAi sequence
accauauuaaaauaagcuacag

SEQ ID NO: 9365 - RNA, 22 nt, Artificial Sequence
  Synthesized RNAi sequence
accaucaucauacacaguucuu

SEQ ID NO: 9366 - RNA, 22 nt, Artificial Sequence
  Synthesized RNAi sequence
accaugucauaauacgcaucac

SEQ ID NO: 9367 - RNA, 22 nt, Artificial Sequence
  Synthesized RNAi sequence
acccaacaauuuaauguugagu

SEQ ID NO: 9368 - RNA, 22 nt, Artificial Sequence
  Synthesized RNAi sequence
acccaacuagcaggcauauaga

SEQ ID NO: 9369 - RNA, 22 nt, Artificial Sequence
  Synthesized RNAi sequence
accugaguaguuagaaguaaca

SEQ ID NO: 9370 - RNA, 22 nt, Artificial Sequence
  Synthesized RNAi sequence
acgagugucaagacauucauaa

SEQ ID NO: 9371 - RNA, 22 nt, Artificial Sequence
  Synthesized RNAi sequence
acgcaucacccaacuagcaggc

SEQ ID NO: 9372 - RNA, 22 nt, Artificial Sequence
  Synthesized RNAi sequence
acuaaaacuaaaagugaaguca

SEQ ID NO: 9373 - RNA, 22 nt, Artificial Sequence
  Synthesized RNAi sequence
acuaaaagugaagucaaaauug

SEQ ID NO: 9374 - RNA, 22 nt, Artificial Sequence
  Synthesized RNAi sequence
acuacaccugaguaguuagaag

SEQ ID NO: 9375 - RNA, 22 nt, Artificial Sequence
  Synthesized RNAi sequence
acuacagcugaugcauacauaa

SEQ ID NO: 9376 - RNA, 22 nt, Artificial Sequence
  Synthesized RNAi sequence
acuacugaugugcacuuuacau

SEQ ID NO: 9377 - RNA, 22 nt, Artificial Sequence
  Synthesized RNAi sequence
acuagcaggcauauagaccaua

SEQ ID NO: 9378 - RNA, 22 nt, Artificial Sequence
  Synthesized RNAi sequence
acuagcauuauacacugaagug

SEQ ID NO: 9379 - RNA, 22 nt, Artificial Sequence
  Synthesized RNAi sequence
acuaguaucaaccauauccaac

SEQ ID NO: 9380 - RNA, 22 nt, Artificial Sequence
  Synthesized RNAi sequence
acuccuguguagaaacuaagua

SEQ ID NO: 9381 - RNA, 22 nt, Artificial Sequence
  Synthesized RNAi sequence
acucuccuagcaccaucaucau

SEQ ID NO: 9382 - RNA, 22 nt, Artificial Sequence
  Synthesized RNAi sequence
acucuggacuaaaacuaaaagu

SEQ ID NO: 9383 - RNA, 22 nt, Artificial Sequence
  Synthesized RNAi sequence
acugaaguguauuaccaguuau

SEQ ID NO: 9384 - RNA, 22 nt, Artificial Sequence
  Synthesized RNAi sequence
acugaugugcacuuuacaucug

SEQ ID NO: 9385 - RNA, 22 nt, Artificial Sequence
  Synthesized RNAi sequence
acuuuacaucugacauuuuaga

SEQ ID NO: 9386 - RNA, 22 nt, Artificial Sequence
  Synthesized RNAi sequence
acuuuauaaacgagugucaaga

SEQ ID NO: 9387 - RNA, 22 nt, Artificial Sequence
  Synthesized RNAi sequence
acuuugauacaagguuugccac

SEQ ID NO: 9388 - RNA, 22 nt, Artificial Sequence
  Synthesized RNAi sequence
agaaacuaaguaaucauaaaca

SEQ ID NO: 9389 - RNA, 22 nt, Artificial Sequence
  Synthesized RNAi sequence
agaaguaacagagauuauaaga

SEQ ID NO: 9390 - RNA, 22 nt, Artificial Sequence
  Synthesized RNAi sequence
agacaaacuaguaucaaccaua

SEQ ID NO: 9391 - RNA, 22 nt, Artificial Sequence
  Synthesized RNAi sequence
agacauucauaaguguccacac

SEQ ID NO: 9392 - RNA, 22 nt, Artificial Sequence
  Synthesized RNAi sequence
agaccauauuaaaauaagcuac

SEQ ID NO: 9393 - RNA, 22 nt, Artificial Sequence
  Synthesized RNAi sequence
agacuguacaguggcuacuuug

SEQ ID NO: 9394 - RNA, 22 nt, Artificial Sequence
  Synthesized RNAi sequence
agagauuauaagagcccacaug

SEQ ID NO: 9395 - RNA, 22 nt, Artificial Sequence
  Synthesized RNAi sequence
agagcccacauggaaauggcuu

SEQ ID NO: 9396 - RNA, 22 nt, Artificial Sequence
  Synthesized RNAi sequence
agagucagucuaaaguagcggu

SEQ ID NO: 9397 - RNA, 22 nt, Artificial Sequence
  Synthesized RNAi sequence
agauuauaagagcccacaugga

SEQ ID NO: 9398 - RNA, 22 nt, Artificial Sequence
  Synthesized RNAi sequence
agcaccaucaucauacacaguu

SEQ ID NO: 9399 - RNA, 22 nt, Artificial Sequence
  Synthesized RNAi sequence
agcagacauagcaauaauaccc

SEQ ID NO: 9400 - RNA, 22 nt, Artificial Sequence
  Synthesized RNAi sequence
agcaggcauauagaccauauua

SEQ ID NO: 9401 - RNA, 22 nt, Artificial Sequence
  Synthesized RNAi sequence
agcauuaccauaauaaacuuua

SEQ ID NO: 9402 - RNA, 22 nt, Artificial Sequence
  Synthesized RNAi sequence
agcauuauacacugaaguguau

SEQ ID NO: 9403 - RNA, 22 nt, Artificial Sequence
  Synthesized RNAi sequence
agcccacauggaaauggcuuga

SEQ ID NO: 9404 - RNA, 22 nt, Artificial Sequence
  Synthesized RNAi sequence
agcgguugaguaaacaaaagag

SEQ ID NO: 9405 - RNA, 22 nt, Artificial Sequence
  Synthesized RNAi sequence
agcugaugcauacauaacacag

SEQ ID NO: 9406 - RNA, 22 nt, Artificial Sequence
  Synthesized RNAi sequence
agcuuaaaaccagacaaacuag

SEQ ID NO: 9407 - RNA, 22 nt, Artificial Sequence
  Synthesized RNAi sequence
aggauuaguaacacuacagcug

SEQ ID NO: 9408 - RNA, 22 nt, Artificial Sequence
  Synthesized RNAi sequence
aggcauauagaccauauuaaaa

SEQ ID NO: 9409 - RNA, 22 nt, Artificial Sequence
  Synthesized RNAi sequence
aggcaucuaugcuauucuuggg

SEQ ID NO: 9410 - RNA, 22 nt, Artificial Sequence
  Synthesized RNAi sequence
aguaacaaccagugguguguac

SEQ ID NO: 9411 - RNA, 22 nt, Artificial Sequence
  Synthesized RNAi sequence
aguaacacuacagcugaugcau

SEQ ID NO: 9412 - RNA, 22 nt, Artificial Sequence
  Synthesized RNAi sequence
aguaaucauaaacaccaagagu

SEQ ID NO: 9413 - RNA, 22 nt, Artificial Sequence
  Synthesized RNAi sequence
aguacucuggacuaaaacuaaa

SEQ ID NO: 9414 - RNA, 22 nt, Artificial Sequence
  Synthesized RNAi sequence
aguagcgguugaguaaacaaaa

SEQ ID NO: 9415 - RNA, 22 nt, Artificial Sequence
  Synthesized RNAi sequence
aguaguuagaaguaacagagau

SEQ ID NO: 9416 - RNA, 22 nt, Artificial Sequence
  Synthesized RNAi sequence
aguaucaaccauauccaaccau

SEQ ID NO: 9417 - RNA, 22 nt, Artificial Sequence
  Synthesized RNAi sequence
agucaaaauugugaguaacaac

SEQ ID NO: 9418 - RNA, 22 nt, Artificial Sequence
  Synthesized RNAi sequence
agucagucuaaaguagcgguug

SEQ ID NO: 9419 - RNA, 22 nt, Artificial Sequence
  Synthesized RNAi sequence
agucuaaaguagcgguugagua

SEQ ID NO: 9420 - RNA, 22 nt, Artificial Sequence
  Synthesized RNAi sequence
agugaagucaaaauugugagua

SEQ ID NO: 9421 - RNA, 22 nt, Artificial Sequence
  Synthesized RNAi sequence
aguggcuacuuugauacaaggu

SEQ ID NO: 9422 - RNA, 22 nt, Artificial Sequence
  Synthesized RNAi sequence
agugguguguacccuugauugu

SEQ ID NO: 9423 - RNA, 22 nt, Artificial Sequence
  Synthesized RNAi sequence
aguguauuaccaguuaugaaga

SEQ ID NO: 9424 - RNA, 22 nt, Artificial Sequence
  Synthesized RNAi sequence
agugucaagacauucauaagug

SEQ ID NO: 9425 - RNA, 22 nt, Artificial Sequence
  Synthesized RNAi sequence
aguguccacacucuccuagcac

SEQ ID NO: 9426 - RNA, 22 nt, Artificial Sequence
  Synthesized RNAi sequence
aguuagaaguaacagagauuau

SEQ ID NO: 9427 - RNA, 22 nt, Artificial Sequence
  Synthesized RNAi sequence
aguucuugcugucauaaggauu

SEQ ID NO: 9428 - RNA, 22 nt, Artificial Sequence
  Synthesized RNAi sequence
aguuugaaggcaucuaugcuau

SEQ ID NO: 9429 - RNA, 22 nt, Artificial Sequence
  Synthesized RNAi sequence
auaaacaccaagagucagucua

SEQ ID NO: 9430 - RNA, 22 nt, Artificial Sequence
  Synthesized RNAi sequence
auaaacgagugucaagacauuc

SEQ ID NO: 9431 - RNA, 22 nt, Artificial Sequence
  Synthesized RNAi sequence
auaaacuagcauuauacacuga

SEQ ID NO: 9432 - RNA, 22 nt, Artificial Sequence
  Synthesized RNAi sequence
auaaacuuuauaaacgaguguc

SEQ ID NO: 9433 - RNA, 22 nt, Artificial Sequence
  Synthesized RNAi sequence
auaagagcccacauggaaaugg

SEQ ID NO: 9434 - RNA, 22 nt, Artificial Sequence
  Synthesized RNAi sequence
auaaggauuaguaacacuacag

SEQ ID NO: 9435 - RNA, 22 nt, Artificial Sequence
  Synthesized RNAi sequence
auaaguguccacacucuccuag

SEQ ID NO: 9436 - RNA, 22 nt, Artificial Sequence
  Synthesized RNAi sequence
auaauaaacuuuauaaacgagu

SEQ ID NO: 9437 - RNA, 22 nt, Artificial Sequence
  Synthesized RNAi sequence
auaauacgcaucacccaacuag

SEQ ID NO: 9438 - RNA, 22 nt, Artificial Sequence
  Synthesized RNAi sequence
auacaagguuugccaccaacac

SEQ ID NO: 9439 - RNA, 22 nt, Artificial Sequence
  Synthesized RNAi sequence
auacacaguucuugcugucaua

SEQ ID NO: 9440 - RNA, 22 nt, Artificial Sequence
  Synthesized RNAi sequence
auacacugaaguguauuaccag

SEQ ID NO: 9441 - RNA, 22 nt, Artificial Sequence
  Synthesized RNAi sequence
auacauaacacagucuuuuagc

SEQ ID NO: 9442 - RNA, 22 nt, Artificial Sequence
  Synthesized RNAi sequence
auacgcaucacccaacuagcag

SEQ ID NO: 9443 - RNA, 22 nt, Artificial Sequence
  Synthesized RNAi sequence
auagaccauauuaaaauaagcu

SEQ ID NO: 9444 - RNA, 22 nt, Artificial Sequence
  Synthesized RNAi sequence
auauagaccauauuaaaauaag

SEQ ID NO: 9445 - RNA, 22 nt, Artificial Sequence
  Synthesized RNAi sequence
auauccaaccaugucauaauac

SEQ ID NO: 9446 - RNA, 22 nt, Artificial Sequence
  Synthesized RNAi sequence
aucauaaacaccaagagucagu

SEQ ID NO: 9447 - RNA, 22 nt, Artificial Sequence
  Synthesized RNAi sequence
aucauacacaguucuugcuguc

SEQ ID NO: 9448 - RNA, 22 nt, Artificial Sequence
  Synthesized RNAi sequence
aucaucauacacaguucuugcu

SEQ ID NO: 9449 - RNA, 22 nt, Artificial Sequence
  Synthesized RNAi sequence
aucauugcaaaagcagacauag

SEQ ID NO: 9450 - RNA, 22 nt, Artificial Sequence
  Synthesized RNAi sequence
auccaaccaugucauaauacgc

SEQ ID NO: 9451 - RNA, 22 nt, Artificial Sequence
  Synthesized RNAi sequence
aucuaugcuauucuuggguggg

SEQ ID NO: 9452 - RNA, 22 nt, Artificial Sequence
  Synthesized RNAi sequence
aucugacauuuuagacuguaca

SEQ ID NO: 9453 - RNA, 22 nt, Artificial Sequence
  Synthesized RNAi sequence
augcauacauaacacagucuuu

SEQ ID NO: 9454 - RNA, 22 nt, Artificial Sequence
  Synthesized RNAi sequence
augcaugcuuauguuugacaaa

SEQ ID NO: 9455 - RNA, 22 nt, Artificial Sequence
  Synthesized RNAi sequence
augcuuauguuugacaaacauc

SEQ ID NO: 9456 - RNA, 22 nt, Artificial Sequence
  Synthesized RNAi sequence
auggaaauggcuugaucuaaag

SEQ ID NO: 9457 - RNA, 22 nt, Artificial Sequence
  Synthesized RNAi sequence
auggcuugaucuaaagcauuac

SEQ ID NO: 9458 - RNA, 22 nt, Artificial Sequence
  Synthesized RNAi sequence
augucauaauacgcaucaccca

SEQ ID NO: 9459 - RNA, 22 nt, Artificial Sequence
  Synthesized RNAi sequence
augugcacuuuacaucugacau

SEQ ID NO: 9460 - RNA, 22 nt, Artificial Sequence
  Synthesized RNAi sequence
auguugaguuugaaggcaucua

SEQ ID NO: 9461 - RNA, 22 nt, Artificial Sequence
  Synthesized RNAi sequence
auguuugacaaacaucauugca

SEQ ID NO: 9462 - RNA, 22 nt, Artificial Sequence
  Synthesized RNAi sequence
auuaaaauaagcuacaguggca

SEQ ID NO: 9463 - RNA, 22 nt, Artificial Sequence
  Synthesized RNAi sequence
auuaccaguuaugaagaaaaua

SEQ ID NO: 9464 - RNA, 22 nt, Artificial Sequence
  Synthesized RNAi sequence
auuaguaacacuacagcugaug

SEQ ID NO: 9465 - RNA, 22 nt, Artificial Sequence
  Synthesized RNAi sequence
auuauaagagcccacauggaaa

SEQ ID NO: 9466 - RNA, 22 nt, Artificial Sequence
  Synthesized RNAi sequence
auuauacacugaaguguauuac

SEQ ID NO: 9467 - RNA, 22 nt, Artificial Sequence
  Synthesized RNAi sequence
auucauaaguguccacacucuc

SEQ ID NO: 9468 - RNA, 22 nt, Artificial Sequence
  Synthesized RNAi sequence
auugaguacucuggacuaaaac

SEQ ID NO: 9469 - RNA, 22 nt, Artificial Sequence
  Synthesized RNAi sequence
auugcaaaagcagacauagcaa

SEQ ID NO: 9470 - RNA, 22 nt, Artificial Sequence
  Synthesized RNAi sequence
auugugaguaacaaccaguggu

SEQ ID NO: 9471 - RNA, 22 nt, Artificial Sequence
  Synthesized RNAi sequence
auuuuagacuguacaguggcua

SEQ ID NO: 9472 - RNA, 22 nt, Artificial Sequence
  Synthesized RNAi sequence
uaaaaccagacaaacuaguauc

SEQ ID NO: 9473 - RNA, 22 nt, Artificial Sequence
  Synthesized RNAi sequence
uaaaacuaaaagugaagucaaa

SEQ ID NO: 9474 - RNA, 22 nt, Artificial Sequence
  Synthesized RNAi sequence
uaaaagugaagucaaaauugug

SEQ ID NO: 9475 - RNA, 22 nt, Artificial Sequence
  Synthesized RNAi sequence
uaaacaccaagagucagucuaa

SEQ ID NO: 9476 - RNA, 22 nt, Artificial Sequence
  Synthesized RNAi sequence
uaaacgagugucaagacauuca

SEQ ID NO: 9477 - RNA, 22 nt, Artificial Sequence
  Synthesized RNAi sequence
uaaacuagcauuauacacugaa

SEQ ID NO: 9478 - RNA, 22 nt, Artificial Sequence
  Synthesized RNAi sequence
uaaacuuuauaaacgaguguca

SEQ ID NO: 9479 - RNA, 22 nt, Artificial Sequence
  Synthesized RNAi sequence
uaaagcauuaccauaauaaacu

SEQ ID NO: 9480 - RNA, 22 nt, Artificial Sequence
  Synthesized RNAi sequence
uaaaguagcgguugaguaaaca

SEQ ID NO: 9481 - RNA, 22 nt, Artificial Sequence
  Synthesized RNAi sequence
uaacaaccagugguguguaccc

SEQ ID NO: 9482 - RNA, 22 nt, Artificial Sequence
  Synthesized RNAi sequence
uaacacagucuuuuagcuuaaa

SEQ ID NO: 9483 - RNA, 22 nt, Artificial Sequence
  Synthesized RNAi sequence
uaacacuacagcugaugcauac

SEQ ID NO: 9484 - RNA, 22 nt, Artificial Sequence
  Synthesized RNAi sequence
uaacagagauuauaagagccca

SEQ ID NO: 9485 - RNA, 22 nt, Artificial Sequence
  Synthesized RNAi sequence
uaacuacaccugaguaguuaga

SEQ ID NO: 9486 - RNA, 22 nt, Artificial Sequence
  Synthesized RNAi sequence
uaagagcccacauggaaauggc

SEQ ID NO: 9487 - RNA, 22 nt, Artificial Sequence
  Synthesized RNAi sequence
uaaggauuaguaacacuacagc

SEQ ID NO: 9488 - RNA, 22 nt, Artificial Sequence
  Synthesized RNAi sequence
uaaguaaucauaaacaccaaga

SEQ ID NO: 9489 - RNA, 22 nt, Artificial Sequence
  Synthesized RNAi sequence
uaaguguccacacucuccuagc

SEQ ID NO: 9490 - RNA, 22 nt, Artificial Sequence
  Synthesized RNAi sequence
uaauaaacuuuauaaacgagug

SEQ ID NO: 9491 - RNA, 22 nt, Artificial Sequence
  Synthesized RNAi sequence
uaauacgcaucacccaacuagc

SEQ ID NO: 9492 - RNA, 22 nt, Artificial Sequence
  Synthesized RNAi sequence
uaaucauaaacaccaagaguca

SEQ ID NO: 9493 - RNA, 22 nt, Artificial Sequence
  Synthesized RNAi sequence
uaauguugaguuugaaggcauc

SEQ ID NO: 9494 - RNA, 22 nt, Artificial Sequence
  Synthesized RNAi sequence
uacaagguuugccaccaacacc

SEQ ID NO: 9495 - RNA, 22 nt, Artificial Sequence
  Synthesized RNAi sequence
uacacaguucuugcugucauaa

SEQ ID NO: 9496 - RNA, 22 nt, Artificial Sequence
  Synthesized RNAi sequence
uacaccugaguaguuagaagua

SEQ ID NO: 9497 - RNA, 22 nt, Artificial Sequence
  Synthesized RNAi sequence
uacacugaaguguauuaccagu

SEQ ID NO: 9498 - RNA, 22 nt, Artificial Sequence
  Synthesized RNAi sequence
uacagcugaugcauacauaaca

SEQ ID NO: 9499 - RNA, 22 nt, Artificial Sequence
  Synthesized RNAi sequence
uacaguggcuacuuugauacaa

SEQ ID NO: 9500 - RNA, 22 nt, Artificial Sequence
  Synthesized RNAi sequence
uacauaacacagucuuuuagcu

SEQ ID NO: 9501 - RNA, 22 nt, Artificial Sequence
  Synthesized RNAi sequence
uacaucugacauuuuagacugu

SEQ ID NO: 9502 - RNA, 22 nt, Artificial Sequence
  Synthesized RNAi sequence
uaccaguuaugaagaaaauagg

SEQ ID NO: 9503 - RNA, 22 nt, Artificial Sequence
  Synthesized RNAi sequence
uacgcaucacccaacuagcagg

SEQ ID NO: 9504 - RNA, 22 nt, Artificial Sequence
  Synthesized RNAi sequence
uacucuggacuaaaacuaaaag

SEQ ID NO: 9505 - RNA, 22 nt, Artificial Sequence
  Synthesized RNAi sequence
uacugaugugcacuuuacaucu

SEQ ID NO: 9506 - RNA, 22 nt, Artificial Sequence
  Synthesized RNAi sequence
uacuuugauacaagguuugcca

SEQ ID NO: 9507 - RNA, 22 nt, Artificial Sequence
  Synthesized RNAi sequence
uagaaacuaaguaaucauaaac

SEQ ID NO: 9508 - RNA, 22 nt, Artificial Sequence
  Synthesized RNAi sequence
uagaaguaacagagauuauaag

SEQ ID NO: 9509 - RNA, 22 nt, Artificial Sequence
  Synthesized RNAi sequence
uagaccauauuaaaauaagcua

SEQ ID NO: 9510 - RNA, 22 nt, Artificial Sequence
  Synthesized RNAi sequence
uagacuguacaguggcuacuuu

SEQ ID NO: 9511 - RNA, 22 nt, Artificial Sequence
  Synthesized RNAi sequence
uagcaccaucaucauacacagu

SEQ ID NO: 9512 - RNA, 22 nt, Artificial Sequence
  Synthesized RNAi sequence
uagcaggcauauagaccauauu

SEQ ID NO: 9513 - RNA, 22 nt, Artificial Sequence
  Synthesized RNAi sequence
uagcauuauacacugaagugua

SEQ ID NO: 9514 - RNA, 22 nt, Artificial Sequence
  Synthesized RNAi sequence
uagcgguugaguaaacaaaaga

SEQ ID NO: 9515 - RNA, 22 nt, Artificial Sequence
  Synthesized RNAi sequence
uagcuuaaaaccagacaaacua

SEQ ID NO: 9516 - RNA, 22 nt, Artificial Sequence
  Synthesized RNAi sequence
uaguaacacuacagcugaugca

SEQ ID NO: 9517 - RNA, 22 nt, Artificial Sequence
  Synthesized RNAi sequence
uaguaucaaccauauccaacca

SEQ ID NO: 9518 - RNA, 22 nt, Artificial Sequence
  Synthesized RNAi sequence
uaguuagaaguaacagagauua

SEQ ID NO: 9519 - RNA, 22 nt, Artificial Sequence
  Synthesized RNAi sequence
uauaaacgagugucaagacauu

SEQ ID NO: 9520 - RNA, 22 nt, Artificial Sequence
  Synthesized RNAi sequence
uauaagagcccacauggaaaug

SEQ ID NO: 9521 - RNA, 22 nt, Artificial Sequence
  Synthesized RNAi sequence
uauacacugaaguguauuacca

SEQ ID NO: 9522 - RNA, 22 nt, Artificial Sequence
  Synthesized RNAi sequence
uauagaccauauuaaaauaagc

SEQ ID NO: 9523 - RNA, 22 nt, Artificial Sequence
  Synthesized RNAi sequence
uaucaaccauauccaaccaugu

SEQ ID NO: 9524 - RNA, 22 nt, Artificial Sequence
  Synthesized RNAi sequence
uauccaaccaugucauaauacg

SEQ ID NO: 9525 - RNA, 22 nt, Artificial Sequence
  Synthesized RNAi sequence
uaugaagaaaauagggcaauac

SEQ ID NO: 9526 - RNA, 22 nt, Artificial Sequence
  Synthesized RNAi sequence
uaugcuauucuugggugggagu

SEQ ID NO: 9527 - RNA, 22 nt, Artificial Sequence
  Synthesized RNAi sequence
uauguuugacaaacaucauugc

SEQ ID NO: 9528 - RNA, 22 nt, Artificial Sequence
  Synthesized RNAi sequence
uauuaaaauaagcuacaguggc

SEQ ID NO: 9529 - RNA, 22 nt, Artificial Sequence
  Synthesized RNAi sequence
ucaaaauugugaguaacaacca

SEQ ID NO: 9530 - RNA, 22 nt, Artificial Sequence
  Synthesized RNAi sequence
ucaaccauauccaaccauguca

SEQ ID NO: 9531 - RNA, 22 nt, Artificial Sequence
  Synthesized RNAi sequence
ucaagacauucauaagugucca

SEQ ID NO: 9532 - RNA, 22 nt, Artificial Sequence
  Synthesized RNAi sequence
ucacccaacuagcaggcauaua

SEQ ID NO: 9533 - RNA, 22 nt, Artificial Sequence
  Synthesized RNAi sequence
ucagucuaaaguagcgguugag

SEQ ID NO: 9534 - RNA, 22 nt, Artificial Sequence
  Synthesized RNAi sequence
ucauaaacaccaagagucaguc

SEQ ID NO: 9535 - RNA, 22 nt, Artificial Sequence
  Synthesized RNAi sequence
ucauaaggauuaguaacacuac

SEQ ID NO: 9536 - RNA, 22 nt, Artificial Sequence
  Synthesized RNAi sequence
ucauaaguguccacacucuccu

SEQ ID NO: 9537 - RNA, 22 nt, Artificial Sequence
  Synthesized RNAi sequence
ucauaauacgcaucacccaacu

SEQ ID NO: 9538 - RNA, 22 nt, Artificial Sequence
  Synthesized RNAi sequence
ucauacacaguucuugcuguca

SEQ ID NO: 9539 - RNA, 22 nt, Artificial Sequence
  Synthesized RNAi sequence
ucaucauacacaguucuugcug

SEQ ID NO: 9540 - RNA, 22 nt, Artificial Sequence
  Synthesized RNAi sequence
ucauugcaaaagcagacauagc

SEQ ID NO: 9541 - RNA, 22 nt, Artificial Sequence
  Synthesized RNAi sequence
uccaaccaugucauaauacgca

SEQ ID NO: 9542 - RNA, 22 nt, Artificial Sequence
  Synthesized RNAi sequence
uccacacucuccuagcaccauc

SEQ ID NO: 9543 - RNA, 22 nt, Artificial Sequence
  Synthesized RNAi sequence
uccuagcaccaucaucauacac

SEQ ID NO: 9544 - RNA, 22 nt, Artificial Sequence
  Synthesized RNAi sequence
uccuguguagaaacuaaguaau

SEQ ID NO: 9545 - RNA, 22 nt, Artificial Sequence
  Synthesized RNAi sequence
ucuaaagcauuaccauaauaaa

SEQ ID NO: 9546 - RNA, 22 nt, Artificial Sequence
  Synthesized RNAi sequence
ucuaaaguagcgguugaguaaa

SEQ ID NO: 9547 - RNA, 22 nt, Artificial Sequence
  Synthesized RNAi sequence
ucuaugcuauucuuggguggga

SEQ ID NO: 9548 - RNA, 22 nt, Artificial Sequence
  Synthesized RNAi sequence
ucuccuagcaccaucaucauac

SEQ ID NO: 9549 - RNA, 22 nt, Artificial Sequence
  Synthesized RNAi sequence
ucugacauuuuagacuguacag

SEQ ID NO: 9550 - RNA, 22 nt, Artificial Sequence
  Synthesized RNAi sequence
ucuggacuaaaacuaaaaguga

SEQ ID NO: 9551 - RNA, 22 nt, Artificial Sequence
  Synthesized RNAi sequence
ucuugcugucauaaggauuagu

SEQ ID NO: 9552 - RNA, 22 nt, Artificial Sequence
  Synthesized RNAi sequence
ucuuuuagcuuaaaaccagaca

SEQ ID NO: 9553 - RNA, 22 nt, Artificial Sequence
  Synthesized RNAi sequence
ugaaggcaucuaugcuauucuu

SEQ ID NO: 9554 - RNA, 22 nt, Artificial Sequence
  Synthesized RNAi sequence
ugaagucaaaauugugaguaac

SEQ ID NO: 9555 - RNA, 22 nt, Artificial Sequence
  Synthesized RNAi sequence
ugaaguguauuaccaguuauga

SEQ ID NO: 9556 - RNA, 22 nt, Artificial Sequence
  Synthesized RNAi sequence
ugacaaacaucauugcaaaagc

SEQ ID NO: 9557 - RNA, 22 nt, Artificial Sequence
  Synthesized RNAi sequence
ugacauuuuagacuguacagug

SEQ ID NO: 9558 - RNA, 22 nt, Artificial Sequence
  Synthesized RNAi sequence
ugaguaaacaaaagaggccaaa

SEQ ID NO: 9559 - RNA, 22 nt, Artificial Sequence
  Synthesized RNAi sequence
ugaguaacaaccaguggugugu

SEQ ID NO: 9560 - RNA, 22 nt, Artificial Sequence
  Synthesized RNAi sequence
ugaguacucuggacuaaaacua

SEQ ID NO: 9561 - RNA, 22 nt, Artificial Sequence
  Synthesized RNAi sequence
ugaguaguuagaaguaacagag

SEQ ID NO: 9562 - RNA, 22 nt, Artificial Sequence
  Synthesized RNAi sequence
ugaguuugaaggcaucuaugcu

SEQ ID NO: 9563 - RNA, 22 nt, Artificial Sequence
  Synthesized RNAi sequence
ugauacaagguuugccaccaac

SEQ ID NO: 9564 - RNA, 22 nt, Artificial Sequence
  Synthesized RNAi sequence
ugaucuaaagcauuaccauaau

SEQ ID NO: 9565 - RNA, 22 nt, Artificial Sequence
  Synthesized RNAi sequence
ugaugcauacauaacacagucu

SEQ ID NO: 9566 - RNA, 22 nt, Artificial Sequence
  Synthesized RNAi sequence
ugaugugcacuuuacaucugac

SEQ ID NO: 9567 - RNA, 22 nt, Artificial Sequence
  Synthesized RNAi sequence
ugcaaaagcagacauagcaaua

SEQ ID NO: 9568 - RNA, 22 nt, Artificial Sequence
  Synthesized RNAi sequence
ugcaugcuuauguuugacaaac

SEQ ID NO: 9569 - RNA, 22 nt, Artificial Sequence
  Synthesized RNAi sequence
ugcugucauaaggauuaguaac

SEQ ID NO: 9570 - RNA, 22 nt, Artificial Sequence
  Synthesized RNAi sequence
ugcuuauguuugacaaacauca

SEQ ID NO: 9571 - RNA, 22 nt, Artificial Sequence
  Synthesized RNAi sequence
uggaaauggcuugaucuaaagc

SEQ ID NO: 9572 - RNA, 22 nt, Artificial Sequence
  Synthesized RNAi sequence
uggacuaaaacuaaaagugaag

SEQ ID NO: 9573 - RNA, 22 nt, Artificial Sequence
  Synthesized RNAi sequence
uggcuacuuugauacaagguuu

SEQ ID NO: 9574 - RNA, 22 nt, Artificial Sequence
  Synthesized RNAi sequence
uggcuugaucuaaagcauuacc

SEQ ID NO: 9575 - RNA, 22 nt, Artificial Sequence
  Synthesized RNAi sequence
uguacaguggcuacuuugauac

SEQ ID NO: 9576 - RNA, 22 nt, Artificial Sequence
  Synthesized RNAi sequence
uguagaaacuaaguaaucauaa

SEQ ID NO: 9577 - RNA, 22 nt, Artificial Sequence
  Synthesized RNAi sequence
uguauuaccaguuaugaagaaa

SEQ ID NO: 9578 - RNA, 22 nt, Artificial Sequence
  Synthesized RNAi sequence
ugucaagacauucauaaguguc

SEQ ID NO: 9579 - RNA, 22 nt, Artificial Sequence
  Synthesized RNAi sequence
ugucauaaggauuaguaacacu

SEQ ID NO: 9580 - RNA, 22 nt, Artificial Sequence
  Synthesized RNAi sequence
ugucauaauacgcaucacccaa

SEQ ID NO: 9581 - RNA, 22 nt, Artificial Sequence
  Synthesized RNAi sequence
uguccacacucuccuagcacca

SEQ ID NO: 9582 - RNA, 22 nt, Artificial Sequence
  Synthesized RNAi sequence
ugugaguaacaaccaguggugu

SEQ ID NO: 9583 - RNA, 22 nt, Artificial Sequence
  Synthesized RNAi sequence
ugugcacuuuacaucugacauu

SEQ ID NO: 9584 - RNA, 22 nt, Artificial Sequence
  Synthesized RNAi sequence
uguguagaaacuaaguaaucau

SEQ ID NO: 9585 - RNA, 22 nt, Artificial Sequence
  Synthesized RNAi sequence
uguugaguuugaaggcaucuau

SEQ ID NO: 9586 - RNA, 22 nt, Artificial Sequence
  Synthesized RNAi sequence
uguuugacaaacaucauugcaa

SEQ ID NO: 9587 - RNA, 22 nt, Artificial Sequence
  Synthesized RNAi sequence
uuaaaaccagacaaacuaguau

SEQ ID NO: 9588 - RNA, 22 nt, Artificial Sequence
  Synthesized RNAi sequence
uuaaaauaagcuacaguggcaa

SEQ ID NO: 9589 - RNA, 22 nt, Artificial Sequence
  Synthesized RNAi sequence
uuaauguugaguuugaaggcau

SEQ ID NO: 9590 - RNA, 22 nt, Artificial Sequence
  Synthesized RNAi sequence
uuacaucugacauuuuagacug

SEQ ID NO: 9591 - RNA, 22 nt, Artificial Sequence
  Synthesized RNAi sequence
uuagaaguaacagagauuauaa

SEQ ID NO: 9592 - RNA, 22 nt, Artificial Sequence
  Synthesized RNAi sequence
uuagacuguacaguggcuacuu

SEQ ID NO: 9593 - RNA, 22 nt, Artificial Sequence
  Synthesized RNAi sequence
uuagcuuaaaaccagacaaacu

SEQ ID NO: 9594 - RNA, 22 nt, Artificial Sequence
  Synthesized RNAi sequence
uuaguaacacuacagcugaugc

SEQ ID NO: 9595 - RNA, 22 nt, Artificial Sequence
  Synthesized RNAi sequence
uuauaagagcccacauggaaau

SEQ ID NO: 9596 - RNA, 22 nt, Artificial Sequence
  Synthesized RNAi sequence
uuaugaagaaaauagggcaaua

SEQ ID NO: 9597 - RNA, 22 nt, Artificial Sequence
  Synthesized RNAi sequence
uuauguuugacaaacaucauug

SEQ ID NO: 9598 - RNA, 22 nt, Artificial Sequence
  Synthesized RNAi sequence
uucauaaguguccacacucucc

SEQ ID NO: 9599 - RNA, 22 nt, Artificial Sequence
  Synthesized RNAi sequence
uucuugcugucauaaggauuag

SEQ ID NO: 9600 - RNA, 22 nt, Artificial Sequence
  Synthesized RNAi sequence
uugaaggcaucuaugcuauucu

SEQ ID NO: 9601 - RNA, 22 nt, Artificial Sequence
  Synthesized RNAi sequence
uugacaaacaucauugcaaaag

SEQ ID NO: 9602 - RNA, 22 nt, Artificial Sequence
  Synthesized RNAi sequence
uugaguaaacaaaagaggccaa

SEQ ID NO: 9603 - RNA, 22 nt, Artificial Sequence
  Synthesized RNAi sequence
uugaguacucuggacuaaaacu

SEQ ID NO: 9604 - RNA, 22 nt, Artificial Sequence
  Synthesized RNAi sequence
uugaguuugaaggcaucuaugc

SEQ ID NO: 9605 - RNA, 22 nt, Artificial Sequence
  Synthesized RNAi sequence
uugauacaagguuugccaccaa

SEQ ID NO: 9606 - RNA, 22 nt, Artificial Sequence
  Synthesized RNAi sequence
uugaucuaaagcauuaccauaa

SEQ ID NO: 9607 - RNA, 22 nt, Artificial Sequence
  Synthesized RNAi sequence
uugccaccaacacccaacaauu

SEQ ID NO: 9608 - RNA, 22 nt, Artificial Sequence
  Synthesized RNAi sequence
uugcugucauaaggauuaguaa

SEQ ID NO: 9609 - RNA, 22 nt, Artificial Sequence
  Synthesized RNAi sequence
uugugaguaacaaccaguggug

SEQ ID NO: 9610 - RNA, 22 nt, Artificial Sequence
  Synthesized RNAi sequence
uuuacaucugacauuuuagacu

SEQ ID NO: 9611 - RNA, 22 nt, Artificial Sequence
  Synthesized RNAi sequence
uuuagacuguacaguggcuacu

SEQ ID NO: 9612 - RNA, 22 nt, Artificial Sequence
  Synthesized RNAi sequence
uuuagcuuaaaaccagacaaac

SEQ ID NO: 9613 - RNA, 22 nt, Artificial Sequence
  Synthesized RNAi sequence
uuuauaaacgagugucaagaca

SEQ ID NO: 9614 - RNA, 22 nt, Artificial Sequence
  Synthesized RNAi sequence
uuugaaggcaucuaugcuauuc

SEQ ID NO: 9615 - RNA, 22 nt, Artificial Sequence
  Synthesized RNAi sequence
uuugacaaacaucauugcaaaa

SEQ ID NO: 9616 - RNA, 22 nt, Artificial Sequence
  Synthesized RNAi sequence
uuugauacaagguuugccacca

SEQ ID NO: 9617 - RNA, 22 nt, Artificial Sequence
  Synthesized RNAi sequence
uuuuagacuguacaguggcuac

SEQ ID NO: 9618 - RNA, 22 nt, Artificial Sequence
  Synthesized RNAi sequence
uuuuagcuuaaaaccagacaaa

SEQ ID NO: 9619 - RNA, 22 nt, Artificial Sequence
  Synthesized RNAi sequence
aaacucugaggcuauagcuugu

SEQ ID NO: 9620 - RNA, 22 nt, Artificial Sequence
  Synthesized RNAi sequence
aaacugagaguaagacuacuga

SEQ ID NO: 9621 - RNA, 22 nt, Artificial Sequence
  Synthesized RNAi sequence
aaagcuuguuuaugucuacagc

SEQ ID NO: 9622 - RNA, 22 nt, Artificial Sequence
  Synthesized RNAi sequence
aacuaaacucugaggcuauagc

SEQ ID NO: 9623 - RNA, 22 nt, Artificial Sequence
  Synthesized RNAi sequence
aacucugaggcuauagcuugua

SEQ ID NO: 9624 - RNA, 22 nt, Artificial Sequence
  Synthesized RNAi sequence
aacugagaguaagacuacugau

SEQ ID NO: 9625 - RNA, 22 nt, Artificial Sequence
  Synthesized RNAi sequence
aacuggacacauugagcccaca

SEQ ID NO: 9626 - RNA, 22 nt, Artificial Sequence
  Synthesized RNAi sequence
aagacuacugaugugcacuuua

SEQ ID NO: 9627 - RNA, 22 nt, Artificial Sequence
  Synthesized RNAi sequence
aagagaaugucauuguguaacu

SEQ ID NO: 9628 - RNA, 22 nt, Artificial Sequence
  Synthesized RNAi sequence
aagcuuguuuaugucuacagca

SEQ ID NO: 9629 - RNA, 22 nt, Artificial Sequence
  Synthesized RNAi sequence
aagggaacuaaacucugaggcu

SEQ ID NO: 9630 - RNA, 22 nt, Artificial Sequence
  Synthesized RNAi sequence
aagguugcccuguuguccagca

SEQ ID NO: 9631 - RNA, 22 nt, Artificial Sequence
  Synthesized RNAi sequence
aaugucauuguguaacuggaca

SEQ ID NO: 9632 - RNA, 22 nt, Artificial Sequence
  Synthesized RNAi sequence
aauuuagaugaugauucuacuc

SEQ ID NO: 9633 - RNA, 22 nt, Artificial Sequence
  Synthesized RNAi sequence
acaaagcuuguuuaugucuaca

SEQ ID NO: 9634 - RNA, 22 nt, Artificial Sequence
  Synthesized RNAi sequence
acaauuuagaugaugauucuac

SEQ ID NO: 9635 - RNA, 22 nt, Artificial Sequence
  Synthesized RNAi sequence
acacauugagcccacaauuuag

SEQ ID NO: 9636 - RNA, 22 nt, Artificial Sequence
  Synthesized RNAi sequence
acagcacccugcauggaaagca

SEQ ID NO: 9637 - RNA, 22 nt, Artificial Sequence
  Synthesized RNAi sequence
acauugagcccacaauuuagau

SEQ ID NO: 9638 - RNA, 22 nt, Artificial Sequence
  Synthesized RNAi sequence
acccugcauggaaagcaaaaca

SEQ ID NO: 9639 - RNA, 22 nt, Artificial Sequence
  Synthesized RNAi sequence
acuaaacucugaggcuauagcu

SEQ ID NO: 9640 - RNA, 22 nt, Artificial Sequence
  Synthesized RNAi sequence
acucugaggcuauagcuuguaa

SEQ ID NO: 9641 - RNA, 22 nt, Artificial Sequence
  Synthesized RNAi sequence
acugagaguaagacuacugaug

SEQ ID NO: 9642 - RNA, 22 nt, Artificial Sequence
  Synthesized RNAi sequence
acuggacacauugagcccacaa

SEQ ID NO: 9643 - RNA, 22 nt, Artificial Sequence
  Synthesized RNAi sequence
agaaugucauuguguaacugga

SEQ ID NO: 9644 - RNA, 22 nt, Artificial Sequence
  Synthesized RNAi sequence
agacuacugaugugcacuuuac

SEQ ID NO: 9645 - RNA, 22 nt, Artificial Sequence
  Synthesized RNAi sequence
agagaaugucauuguguaacug

SEQ ID NO: 9646 - RNA, 22 nt, Artificial Sequence
  Synthesized RNAi sequence
agaguaagacuacugaugugca

SEQ ID NO: 9647 - RNA, 22 nt, Artificial Sequence
  Synthesized RNAi sequence
agaugaugauucuacucugagu

SEQ ID NO: 9648 - RNA, 22 nt, Artificial Sequence
  Synthesized RNAi sequence
agcacccugcauggaaagcaaa

SEQ ID NO: 9649 - RNA, 22 nt, Artificial Sequence
  Synthesized RNAi sequence
agcauuucuucacaaagcuugu

SEQ ID NO: 9650 - RNA, 22 nt, Artificial Sequence
  Synthesized RNAi sequence
agcccacaauuuagaugaugau

SEQ ID NO: 9651 - RNA, 22 nt, Artificial Sequence
  Synthesized RNAi sequence
agcuaagagaaugucauugugu

SEQ ID NO: 9652 - RNA, 22 nt, Artificial Sequence
  Synthesized RNAi sequence
agcuuguaagguugcccuguug

SEQ ID NO: 9653 - RNA, 22 nt, Artificial Sequence
  Synthesized RNAi sequence
agcuuguuuaugucuacagcac

SEQ ID NO: 9654 - RNA, 22 nt, Artificial Sequence
  Synthesized RNAi sequence
aggcuauagcuuguaagguugc

SEQ ID NO: 9655 - RNA, 22 nt, Artificial Sequence
  Synthesized RNAi sequence
agggaacuaaacucugaggcua

SEQ ID NO: 9656 - RNA, 22 nt, Artificial Sequence
  Synthesized RNAi sequence
agguugcccuguuguccagcau

SEQ ID NO: 9657 - RNA, 22 nt, Artificial Sequence
  Synthesized RNAi sequence
aguaagacuacugaugugcacu

SEQ ID NO: 9658 - RNA, 22 nt, Artificial Sequence
  Synthesized RNAi sequence
aguaguaucuuuagcuaagaga

SEQ ID NO: 9659 - RNA, 22 nt, Artificial Sequence
  Synthesized RNAi sequence
aguuguugcaaaacugagagua

SEQ ID NO: 9660 - RNA, 22 nt, Artificial Sequence
  Synthesized RNAi sequence
auagcuuguaagguugcccugu

SEQ ID NO: 9661 - RNA, 22 nt, Artificial Sequence
  Synthesized RNAi sequence
aucuuuagcuaagagaauguca

SEQ ID NO: 9662 - RNA, 22 nt, Artificial Sequence
  Synthesized RNAi sequence
augaugauucuacucugaguug

SEQ ID NO: 9663 - RNA, 22 nt, Artificial Sequence
  Synthesized RNAi sequence
augauggaagggaacuaaacuc

SEQ ID NO: 9664 - RNA, 22 nt, Artificial Sequence
  Synthesized RNAi sequence
augauucuacucugaguuguug

SEQ ID NO: 9665 - RNA, 22 nt, Artificial Sequence
  Synthesized RNAi sequence
auggaagggaacuaaacucuga

SEQ ID NO: 9666 - RNA, 22 nt, Artificial Sequence
  Synthesized RNAi sequence
augucauuguguaacuggacac

SEQ ID NO: 9667 - RNA, 22 nt, Artificial Sequence
  Synthesized RNAi sequence
augucuacagcacccugcaugg

SEQ ID NO: 9668 - RNA, 22 nt, Artificial Sequence
  Synthesized RNAi sequence
auucuacucugaguuguugcaa

SEQ ID NO: 9669 - RNA, 22 nt, Artificial Sequence
  Synthesized RNAi sequence
auugagcccacaauuuagauga

SEQ ID NO: 9670 - RNA, 22 nt, Artificial Sequence
  Synthesized RNAi sequence
auuguguaacuggacacauuga

SEQ ID NO: 9671 - RNA, 22 nt, Artificial Sequence
  Synthesized RNAi sequence
auuucuucacaaagcuuguuua

SEQ ID NO: 9672 - RNA, 22 nt, Artificial Sequence
  Synthesized RNAi sequence
uaaacucugaggcuauagcuug

SEQ ID NO: 9673 - RNA, 22 nt, Artificial Sequence
  Synthesized RNAi sequence
uaacuggacacauugagcccac

SEQ ID NO: 9674 - RNA, 22 nt, Artificial Sequence
  Synthesized RNAi sequence
uaagacuacugaugugcacuuu

SEQ ID NO: 9675 - RNA, 22 nt, Artificial Sequence
  Synthesized RNAi sequence
uaagagaaugucauuguguaac

SEQ ID NO: 9676 - RNA, 22 nt, Artificial Sequence
  Synthesized RNAi sequence
uaagguugcccuguuguccagc

SEQ ID NO: 9677 - RNA, 22 nt, Artificial Sequence
  Synthesized RNAi sequence
uacagcacccugcauggaaagc

SEQ ID NO: 9678 - RNA, 22 nt, Artificial Sequence
  Synthesized RNAi sequence
uacucugaguuguugcaaaacu

SEQ ID NO: 9679 - RNA, 22 nt, Artificial Sequence
  Synthesized RNAi sequence
uagaugaugauucuacucugag

SEQ ID NO: 9680 - RNA, 22 nt, Artificial Sequence
  Synthesized RNAi sequence
uagcuaagagaaugucauugug

SEQ ID NO: 9681 - RNA, 22 nt, Artificial Sequence
  Synthesized RNAi sequence
uagcuuguaagguugcccuguu

SEQ ID NO: 9682 - RNA, 22 nt, Artificial Sequence
  Synthesized RNAi sequence
uaguaucuuuagcuaagagaau

SEQ ID NO: 9683 - RNA, 22 nt, Artificial Sequence
  Synthesized RNAi sequence
uauagcuuguaagguugcccug

SEQ ID NO: 9684 - RNA, 22 nt, Artificial Sequence
  Synthesized RNAi sequence
uaucuuuagcuaagagaauguc

SEQ ID NO: 9685 - RNA, 22 nt, Artificial Sequence
  Synthesized RNAi sequence
uaugauggaagggaacuaaacu

SEQ ID NO: 9686 - RNA, 22 nt, Artificial Sequence
  Synthesized RNAi sequence
uaugucuacagcacccugcaug

SEQ ID NO: 9687 - RNA, 22 nt, Artificial Sequence
  Synthesized RNAi sequence
ucauuguguaacuggacacauu

SEQ ID NO: 9688 - RNA, 22 nt, Artificial Sequence
  Synthesized RNAi sequence
uccagcauuucuucacaaagcu

SEQ ID NO: 9689 - RNA, 22 nt, Artificial Sequence
  Synthesized RNAi sequence
ucuacagcacccugcauggaaa

SEQ ID NO: 9690 - RNA, 22 nt, Artificial Sequence
  Synthesized RNAi sequence
ucuacucugaguuguugcaaaa

SEQ ID NO: 9691 - RNA, 22 nt, Artificial Sequence
  Synthesized RNAi sequence
ucugaggcuauagcuuguaagg

SEQ ID NO: 9692 - RNA, 22 nt, Artificial Sequence
  Synthesized RNAi sequence
ucuucacaaagcuuguuuaugu

SEQ ID NO: 9693 - RNA, 22 nt, Artificial Sequence
  Synthesized RNAi sequence
ucuuuagcuaagagaaugucau

SEQ ID NO: 9694 - RNA, 22 nt, Artificial Sequence
  Synthesized RNAi sequence
ugagaguaagacuacugaugug

SEQ ID NO: 9695 - RNA, 22 nt, Artificial Sequence
  Synthesized RNAi sequence
ugagcccacaauuuagaugaug

SEQ ID NO: 9696 - RNA, 22 nt, Artificial Sequence
  Synthesized RNAi sequence
ugaggcuauagcuuguaagguu

SEQ ID NO: 9697 - RNA, 22 nt, Artificial Sequence
  Synthesized RNAi sequence
ugaguuguugcaaaacugagag

SEQ ID NO: 9698 - RNA, 22 nt, Artificial Sequence
  Synthesized RNAi sequence
ugaugauucuacucugaguugu

SEQ ID NO: 9699 - RNA, 22 nt, Artificial Sequence
  Synthesized RNAi sequence
ugauggaagggaacuaaacucu

SEQ ID NO: 9700 - RNA, 22 nt, Artificial Sequence
  Synthesized RNAi sequence
ugauucuacucugaguuguugc

SEQ ID NO: 9701 - RNA, 22 nt, Artificial Sequence
  Synthesized RNAi sequence
ugcaaaacugagaguaagacua

SEQ ID NO: 9702 - RNA, 22 nt, Artificial Sequence
  Synthesized RNAi sequence
uggaagggaacuaaacucugag

SEQ ID NO: 9703 - RNA, 22 nt, Artificial Sequence
  Synthesized RNAi sequence
uggacacauugagcccacaauu

SEQ ID NO: 9704 - RNA, 22 nt, Artificial Sequence
  Synthesized RNAi sequence
uguaacuggacacauugagccc

SEQ ID NO: 9705 - RNA, 22 nt, Artificial Sequence
  Synthesized RNAi sequence
uguaagguugcccuguugucca

SEQ ID NO: 9706 - RNA, 22 nt, Artificial Sequence
  Synthesized RNAi sequence
ugucauuguguaacuggacaca

SEQ ID NO: 9707 - RNA, 22 nt, Artificial Sequence
  Synthesized RNAi sequence
uguccagcauuucuucacaaag

SEQ ID NO: 9708 - RNA, 22 nt, Artificial Sequence
  Synthesized RNAi sequence
ugucuacagcacccugcaugga

SEQ ID NO: 9709 - RNA, 22 nt, Artificial Sequence
  Synthesized RNAi sequence
uguguaacuggacacauugagc

SEQ ID NO: 9710 - RNA, 22 nt, Artificial Sequence
  Synthesized RNAi sequence
uguugcaaaacugagaguaaga

SEQ ID NO: 9711 - RNA, 22 nt, Artificial Sequence
  Synthesized RNAi sequence
uuagaugaugauucuacucuga

SEQ ID NO: 9712 - RNA, 22 nt, Artificial Sequence
  Synthesized RNAi sequence
uuagcuaagagaaugucauugu

SEQ ID NO: 9713 - RNA, 22 nt, Artificial Sequence
  Synthesized RNAi sequence
uuaugucuacagcacccugcau

SEQ ID NO: 9714 - RNA, 22 nt, Artificial Sequence
  Synthesized RNAi sequence
uucacaaagcuuguuuaugucu

SEQ ID NO: 9715 - RNA, 22 nt, Artificial Sequence
  Synthesized RNAi sequence
uucuacucugaguuguugcaaa

SEQ ID NO: 9716 - RNA, 22 nt, Artificial Sequence
  Synthesized RNAi sequence
uucuucacaaagcuuguuuaug

SEQ ID NO: 9717 - RNA, 22 nt, Artificial Sequence
  Synthesized RNAi sequence
uugagcccacaauuuagaugau

SEQ ID NO: 9718 - RNA, 22 nt, Artificial Sequence
  Synthesized RNAi sequence
uugcaaaacugagaguaagacu

SEQ ID NO: 9719 - RNA, 22 nt, Artificial Sequence
  Synthesized RNAi sequence
uugcccuguuguccagcauuuc

SEQ ID NO: 9720 - RNA, 22 nt, Artificial Sequence
  Synthesized RNAi sequence
uuguaagguugcccuguugucc

SEQ ID NO: 9721 - RNA, 22 nt, Artificial Sequence
  Synthesized RNAi sequence
uuguccagcauuucuucacaaa

SEQ ID NO: 9722 - RNA, 22 nt, Artificial Sequence
  Synthesized RNAi sequence
uuguguaacuggacacauugag

SEQ ID NO: 9723 - RNA, 22 nt, Artificial Sequence
  Synthesized RNAi sequence
uuguugcaaaacugagaguaag

SEQ ID NO: 9724 - RNA, 22 nt, Artificial Sequence
  Synthesized RNAi sequence
uuguuuaugucuacagcacccu

SEQ ID NO: 9725 - RNA, 22 nt, Artificial Sequence
  Synthesized RNAi sequence
uuuagaugaugauucuacucug

SEQ ID NO: 9726 - RNA, 22 nt, Artificial Sequence
  Synthesized RNAi sequence
uuuagcuaagagaaugucauug

SEQ ID NO: 9727 - RNA, 22 nt, Artificial Sequence
  Synthesized RNAi sequence
uuuaugucuacagcacccugca

SEQ ID NO: 9728 - RNA, 22 nt, Artificial Sequence
  Synthesized RNAi sequence
uuucuucacaaagcuuguuuau

SEQ ID NO: 9729 - RNA, 22 nt, Artificial Sequence
  Synthesized RNAi sequence
aaagcauugucugcauagcacu

SEQ ID NO: 9730 - RNA, 22 nt, Artificial Sequence
  Synthesized RNAi sequence
aaagcugcauaugauggaaggg

SEQ ID NO: 9731 - RNA, 22 nt, Artificial Sequence
  Synthesized RNAi sequence
aaagcuguuacaauaagaggcc

SEQ ID NO: 9732 - RNA, 22 nt, Artificial Sequence
  Synthesized RNAi sequence
aaauuaggugaauuguccauac

SEQ ID NO: 9733 - RNA, 22 nt, Artificial Sequence
  Synthesized RNAi sequence
aacaauuuuacuaucugcaucu

SEQ ID NO: 9734 - RNA, 22 nt, Artificial Sequence
  Synthesized RNAi sequence
aacacaaccaucucuugcauug

SEQ ID NO: 9735 - RNA, 22 nt, Artificial Sequence
  Synthesized RNAi sequence
aacagccugcucauaagcuucu

SEQ ID NO: 9736 - RNA, 22 nt, Artificial Sequence
  Synthesized RNAi sequence
aacaggacuaagcucauuauuc

SEQ ID NO: 9737 - RNA, 22 nt, Artificial Sequence
  Synthesized RNAi sequence
aaccaucucuugcauuguugau

SEQ ID NO: 9738 - RNA, 22 nt, Artificial Sequence
  Synthesized RNAi sequence
aaccauuaguuuggcugcuguu

SEQ ID NO: 9739 - RNA, 22 nt, Artificial Sequence
  Synthesized RNAi sequence
aacuuacguugcauggcugcau

SEQ ID NO: 9740 - RNA, 22 nt, Artificial Sequence
  Synthesized RNAi sequence
aacuuucuaagcauagugaaaa

SEQ ID NO: 9741 - RNA, 22 nt, Artificial Sequence
  Synthesized RNAi sequence
aagagguauuauguucaaggga

SEQ ID NO: 9742 - RNA, 22 nt, Artificial Sequence
  Synthesized RNAi sequence
aagcauagugaaaagcauuguc

SEQ ID NO: 9743 - RNA, 22 nt, Artificial Sequence
  Synthesized RNAi sequence
aagcauugucugcauagcacua

SEQ ID NO: 9744 - RNA, 22 nt, Artificial Sequence
  Synthesized RNAi sequence
aagcucauuauucuguaauuug

SEQ ID NO: 9745 - RNA, 22 nt, Artificial Sequence
  Synthesized RNAi sequence
aagcuguuacaauaagaggcca

SEQ ID NO: 9746 - RNA, 22 nt, Artificial Sequence
  Synthesized RNAi sequence
aagcuucuugagcaguagcaaa

SEQ ID NO: 9747 - RNA, 22 nt, Artificial Sequence
  Synthesized RNAi sequence
aagggaacacaaccaucucuug

SEQ ID NO: 9748 - RNA, 22 nt, Artificial Sequence
  Synthesized RNAi sequence
aaguugaacaauuuuacuaucu

SEQ ID NO: 9749 - RNA, 22 nt, Artificial Sequence
  Synthesized RNAi sequence
aauaagaggccaugcuaaauua

SEQ ID NO: 9750 - RNA, 22 nt, Artificial Sequence
  Synthesized RNAi sequence
aaucaccauuagcaacagccug

SEQ ID NO: 9751 - RNA, 22 nt, Artificial Sequence
  Synthesized RNAi sequence
aaugcugaugcauaaguaaaug

SEQ ID NO: 9752 - RNA, 22 nt, Artificial Sequence
  Synthesized RNAi sequence
aauuaggugaauuguccauacu

SEQ ID NO: 9753 - RNA, 22 nt, Artificial Sequence
  Synthesized RNAi sequence
aauucagauuuagccacauuca

SEQ ID NO: 9754 - RNA, 22 nt, Artificial Sequence
  Synthesized RNAi sequence
aauuggcccuuaaagcuguuac

SEQ ID NO: 9755 - RNA, 22 nt, Artificial Sequence
  Synthesized RNAi sequence
aauuguccauacuaauuucacu

SEQ ID NO: 9756 - RNA, 22 nt, Artificial Sequence
  Synthesized RNAi sequence
aauuucacuaaguugaacaauu

SEQ ID NO: 9757 - RNA, 22 nt, Artificial Sequence
  Synthesized RNAi sequence
aauuugacagcagaauuggccc

SEQ ID NO: 9758 - RNA, 22 nt, Artificial Sequence
  Synthesized RNAi sequence
aauuuuacuaucugcaucuaca

SEQ ID NO: 9759 - RNA, 22 nt, Artificial Sequence
  Synthesized RNAi sequence
acaaccaucucuugcauuguug

SEQ ID NO: 9760 - RNA, 22 nt, Artificial Sequence
  Synthesized RNAi sequence
acaaccuguuggauuucccaca

SEQ ID NO: 9761 - RNA, 22 nt, Artificial Sequence
  Synthesized RNAi sequence
acaauaagaggccaugcuaaau

SEQ ID NO: 9762 - RNA, 22 nt, Artificial Sequence
  Synthesized RNAi sequence
acaaugcugaugcauaaguaaa

SEQ ID NO: 9763 - RNA, 22 nt, Artificial Sequence
  Synthesized RNAi sequence
acaauuuuacuaucugcaucua

SEQ ID NO: 9764 - RNA, 22 nt, Artificial Sequence
  Synthesized RNAi sequence
acacaaccaucucuugcauugu

SEQ ID NO: 9765 - RNA, 22 nt, Artificial Sequence
  Synthesized RNAi sequence
acagcagaauuggcccuuaaag

SEQ ID NO: 9766 - RNA, 22 nt, Artificial Sequence
  Synthesized RNAi sequence
acaggacuaagcucauuauucu

SEQ ID NO: 9767 - RNA, 22 nt, Artificial Sequence
  Synthesized RNAi sequence
acauuugggucauagcuugauc

SEQ ID NO: 9768 - RNA, 22 nt, Artificial Sequence
  Synthesized RNAi sequence
accaucucuugcauuguugaua

SEQ ID NO: 9769 - RNA, 22 nt, Artificial Sequence
  Synthesized RNAi sequence
accauuagcaacagccugcuca

SEQ ID NO: 9770 - RNA, 22 nt, Artificial Sequence
  Synthesized RNAi sequence
accauuaguuuggcugcuguug

SEQ ID NO: 9771 - RNA, 22 nt, Artificial Sequence
  Synthesized RNAi sequence
accuguuggauuucccacaaug

SEQ ID NO: 9772 - RNA, 22 nt, Artificial Sequence
  Synthesized RNAi sequence
acggucaaauucagauuuagcc

SEQ ID NO: 9773 - RNA, 22 nt, Artificial Sequence
  Synthesized RNAi sequence
acguugcauggcugcaucacgg

SEQ ID NO: 9774 - RNA, 22 nt, Artificial Sequence
  Synthesized RNAi sequence
acuaagcucauuauucuguaau

SEQ ID NO: 9775 - RNA, 22 nt, Artificial Sequence
  Synthesized RNAi sequence
acuaaguugaacaauuuuacua

SEQ ID NO: 9776 - RNA, 22 nt, Artificial Sequence
  Synthesized RNAi sequence
acuaauuucacuaaguugaaca

SEQ ID NO: 9777 - RNA, 22 nt, Artificial Sequence
  Synthesized RNAi sequence
acuaguaacuuuugcccucuug

SEQ ID NO: 9778 - RNA, 22 nt, Artificial Sequence
  Synthesized RNAi sequence
acuaucugcaucuacaaccugu

SEQ ID NO: 9779 - RNA, 22 nt, Artificial Sequence
  Synthesized RNAi sequence
acuuacguugcauggcugcauc

SEQ ID NO: 9780 - RNA, 22 nt, Artificial Sequence
  Synthesized RNAi sequence
acuuucuaagcauagugaaaag

SEQ ID NO: 9781 - RNA, 22 nt, Artificial Sequence
  Synthesized RNAi sequence
agaaucaccauuagcaacagcc

SEQ ID NO: 9782 - RNA, 22 nt, Artificial Sequence
  Synthesized RNAi sequence
agaauuggcccuuaaagcuguu

SEQ ID NO: 9783 - RNA, 22 nt, Artificial Sequence
  Synthesized RNAi sequence
agaggccaugcuaaauuaggug

SEQ ID NO: 9784 - RNA, 22 nt, Artificial Sequence
  Synthesized RNAi sequence
agagguauuauguucaagggaa

SEQ ID NO: 9785 - RNA, 22 nt, Artificial Sequence
  Synthesized RNAi sequence
agaucuagccuguuuauacauu

SEQ ID NO: 9786 - RNA, 22 nt, Artificial Sequence
  Synthesized RNAi sequence
agcaaaagcugcauaugaugga

SEQ ID NO: 9787 - RNA, 22 nt, Artificial Sequence
  Synthesized RNAi sequence
agcaacagccugcucauaagcu

SEQ ID NO: 9788 - RNA, 22 nt, Artificial Sequence
  Synthesized RNAi sequence
agcacuaguaacuuuugcccuc

SEQ ID NO: 9789 - RNA, 22 nt, Artificial Sequence
  Synthesized RNAi sequence
agcagaauuggcccuuaaagcu

SEQ ID NO: 9790 - RNA, 22 nt, Artificial Sequence
  Synthesized RNAi sequence
agcauagugaaaagcauugucu

SEQ ID NO: 9791 - RNA, 22 nt, Artificial Sequence
  Synthesized RNAi sequence
agcauugucugcauagcacuag

SEQ ID NO: 9792 - RNA, 22 nt, Artificial Sequence
  Synthesized RNAi sequence
agccaucuuuuccaacuuacgu

SEQ ID NO: 9793 - RNA, 22 nt, Artificial Sequence
  Synthesized RNAi sequence
agccugcucauaagcuucuuga

SEQ ID NO: 9794 - RNA, 22 nt, Artificial Sequence
  Synthesized RNAi sequence
agccuguuuauacauuuggguc

SEQ ID NO: 9795 - RNA, 22 nt, Artificial Sequence
  Synthesized RNAi sequence
agcucauuauucuguaauuuga

SEQ ID NO: 9796 - RNA, 22 nt, Artificial Sequence
  Synthesized RNAi sequence
agcuguuacaauaagaggccau

SEQ ID NO: 9797 - RNA, 22 nt, Artificial Sequence
  Synthesized RNAi sequence
agcuucuugagcaguagcaaaa

SEQ ID NO: 9798 - RNA, 22 nt, Artificial Sequence
  Synthesized RNAi sequence
agcuugaucagccaucuuuucc

SEQ ID NO: 9799 - RNA, 22 nt, Artificial Sequence
  Synthesized RNAi sequence
aggacuaagcucauuauucugu

SEQ ID NO: 9800 - RNA, 22 nt, Artificial Sequence
  Synthesized RNAi sequence
aggccaugcuaaauuaggugaa

SEQ ID NO: 9801 - RNA, 22 nt, Artificial Sequence
  Synthesized RNAi sequence
agggaacacaaccaucucuugc

SEQ ID NO: 9802 - RNA, 22 nt, Artificial Sequence
  Synthesized RNAi sequence
agguauuauguucaagggaaca

SEQ ID NO: 9803 - RNA, 22 nt, Artificial Sequence
  Synthesized RNAi sequence
aggugaauuguccauacuaauu

SEQ ID NO: 9804 - RNA, 22 nt, Artificial Sequence
  Synthesized RNAi sequence
aguaacuuuugcccucuugucc

SEQ ID NO: 9805 - RNA, 22 nt, Artificial Sequence
  Synthesized RNAi sequence
aguagcaaaagcugcauaugau

SEQ ID NO: 9806 - RNA, 22 nt, Artificial Sequence
  Synthesized RNAi sequence
agucugguaugacaaccauuag

SEQ ID NO: 9807 - RNA, 22 nt, Artificial Sequence
  Synthesized RNAi sequence
agugaaaagcauugucugcaua

SEQ ID NO: 9808 - RNA, 22 nt, Artificial Sequence
  Synthesized RNAi sequence
agugcaacaggacuaagcucau

SEQ ID NO: 9809 - RNA, 22 nt, Artificial Sequence
  Synthesized RNAi sequence
agugcaucauuauccaacuuuc

SEQ ID NO: 9810 - RNA, 22 nt, Artificial Sequence
  Synthesized RNAi sequence
aguugaacaauuuuacuaucug

SEQ ID NO: 9811 - RNA, 22 nt, Artificial Sequence
  Synthesized RNAi sequence
aguuuggcugcuguuguaagag

SEQ ID NO: 9812 - RNA, 22 nt, Artificial Sequence
  Synthesized RNAi sequence
auaagaggccaugcuaaauuag

SEQ ID NO: 9813 - RNA, 22 nt, Artificial Sequence
  Synthesized RNAi sequence
auaagcuucuugagcaguagca

SEQ ID NO: 9814 - RNA, 22 nt, Artificial Sequence
  Synthesized RNAi sequence
auaauguuguugagugcaucau

SEQ ID NO: 9815 - RNA, 22 nt, Artificial Sequence
  Synthesized RNAi sequence
auacauuugggucauagcuuga

SEQ ID NO: 9816 - RNA, 22 nt, Artificial Sequence
  Synthesized RNAi sequence
auacuaauuucacuaaguugaa

SEQ ID NO: 9817 - RNA, 22 nt, Artificial Sequence
  Synthesized RNAi sequence
auagcacuaguaacuuuugccc

SEQ ID NO: 9818 - RNA, 22 nt, Artificial Sequence
  Synthesized RNAi sequence
auagugaaaagcauugucugca

SEQ ID NO: 9819 - RNA, 22 nt, Artificial Sequence
  Synthesized RNAi sequence
auaugauggaagggaacuaaac

SEQ ID NO: 9820 - RNA, 22 nt, Artificial Sequence
  Synthesized RNAi sequence
aucaccauuagcaacagccugc

SEQ ID NO: 9821 - RNA, 22 nt, Artificial Sequence
  Synthesized RNAi sequence
aucacggucaaauucagauuua

SEQ ID NO: 9822 - RNA, 22 nt, Artificial Sequence
  Synthesized RNAi sequence
aucagccaucuuuuccaacuua

SEQ ID NO: 9823 - RNA, 22 nt, Artificial Sequence
  Synthesized RNAi sequence
aucauuauccaacuuucuaagc

SEQ ID NO: 9824 - RNA, 22 nt, Artificial Sequence
  Synthesized RNAi sequence
auccaacuuucuaagcauagug

SEQ ID NO: 9825 - RNA, 22 nt, Artificial Sequence
  Synthesized RNAi sequence
aucuacaaccuguuggauuucc

SEQ ID NO: 9826 - RNA, 22 nt, Artificial Sequence
  Synthesized RNAi sequence
aucuagccuguuuauacauuug

SEQ ID NO: 9827 - RNA, 22 nt, Artificial Sequence
  Synthesized RNAi sequence
aucucuugcauuguugauaaug

SEQ ID NO: 9828 - RNA, 22 nt, Artificial Sequence
  Synthesized RNAi sequence
aucugcaucuacaaccuguugg

SEQ ID NO: 9829 - RNA, 22 nt, Artificial Sequence
  Synthesized RNAi sequence
aucugucguagugcaacaggac

SEQ ID NO: 9830 - RNA, 22 nt, Artificial Sequence
  Synthesized RNAi sequence
aucuuuuccaacuuacguugca

SEQ ID NO: 9831 - RNA, 22 nt, Artificial Sequence
  Synthesized RNAi sequence
augacaaccauuaguuuggcug

SEQ ID NO: 9832 - RNA, 22 nt, Artificial Sequence
  Synthesized RNAi sequence
augcauaaguaaauguuguacc

SEQ ID NO: 9833 - RNA, 22 nt, Artificial Sequence
  Synthesized RNAi sequence
augcuaaauuaggugaauuguc

SEQ ID NO: 9834 - RNA, 22 nt, Artificial Sequence
  Synthesized RNAi sequence
augcugaugcauaaguaaaugu

SEQ ID NO: 9835 - RNA, 22 nt, Artificial Sequence
  Synthesized RNAi sequence
auggcugcaucacggucaaauu

SEQ ID NO: 9836 - RNA, 22 nt, Artificial Sequence
  Synthesized RNAi sequence
auguucaagggaacacaaccau

SEQ ID NO: 9837 - RNA, 22 nt, Artificial Sequence
  Synthesized RNAi sequence
auguuguugagugcaucauuau

SEQ ID NO: 9838 - RNA, 22 nt, Artificial Sequence
  Synthesized RNAi sequence
auuagcaacagccugcucauaa

SEQ ID NO: 9839 - RNA, 22 nt, Artificial Sequence
  Synthesized RNAi sequence
auuaggugaauuguccauacua

SEQ ID NO: 9840 - RNA, 22 nt, Artificial Sequence
  Synthesized RNAi sequence
auuaguuuggcugcuguuguaa

SEQ ID NO: 9841 - RNA, 22 nt, Artificial Sequence
  Synthesized RNAi sequence
auuauccaacuuucuaagcaua

SEQ ID NO: 9842 - RNA, 22 nt, Artificial Sequence
  Synthesized RNAi sequence
auuauguucaagggaacacaac

SEQ ID NO: 9843 - RNA, 22 nt, Artificial Sequence
  Synthesized RNAi sequence
auuauucuguaauuugacagca

SEQ ID NO: 9844 - RNA, 22 nt, Artificial Sequence
  Synthesized RNAi sequence
auucagauuuagccacauucaa

SEQ ID NO: 9845 - RNA, 22 nt, Artificial Sequence
  Synthesized RNAi sequence
auucuguaauuugacagcagaa

SEQ ID NO: 9846 - RNA, 22 nt, Artificial Sequence
  Synthesized RNAi sequence
auuggcccuuaaagcuguuaca

SEQ ID NO: 9847 - RNA, 22 nt, Artificial Sequence
  Synthesized RNAi sequence
auuguccauacuaauuucacua

SEQ ID NO: 9848 - RNA, 22 nt, Artificial Sequence
  Synthesized RNAi sequence
auugucugcauagcacuaguaa

SEQ ID NO: 9849 - RNA, 22 nt, Artificial Sequence
  Synthesized RNAi sequence
auuguugauaauguuguugagu

SEQ ID NO: 9850 - RNA, 22 nt, Artificial Sequence
  Synthesized RNAi sequence
auuucccacaaugcugaugcau

SEQ ID NO: 9851 - RNA, 22 nt, Artificial Sequence
  Synthesized RNAi sequence
auuugacagcagaauuggcccu

SEQ ID NO: 9852 - RNA, 22 nt, Artificial Sequence
  Synthesized RNAi sequence
auuugggucauagcuugaucag

SEQ ID NO: 9853 - RNA, 22 nt, Artificial Sequence
  Synthesized RNAi sequence
auuuuacuaucugcaucuacaa

SEQ ID NO: 9854 - RNA, 22 nt, Artificial Sequence
  Synthesized RNAi sequence
uaaagcuguuacaauaagaggc

SEQ ID NO: 9855 - RNA, 22 nt, Artificial Sequence
  Synthesized RNAi sequence
uaaauuaggugaauuguccaua

SEQ ID NO: 9856 - RNA, 22 nt, Artificial Sequence
  Synthesized RNAi sequence
uaacuuuugcccucuuguccuc

SEQ ID NO: 9857 - RNA, 22 nt, Artificial Sequence
  Synthesized RNAi sequence
uaagaggccaugcuaaauuagg

SEQ ID NO: 9858 - RNA, 22 nt, Artificial Sequence
  Synthesized RNAi sequence
uaagagguauuauguucaaggg

SEQ ID NO: 9859 - RNA, 22 nt, Artificial Sequence
  Synthesized RNAi sequence
uaagcauagugaaaagcauugu

SEQ ID NO: 9860 - RNA, 22 nt, Artificial Sequence
  Synthesized RNAi sequence
uaagcucauuauucuguaauuu

SEQ ID NO: 9861 - RNA, 22 nt, Artificial Sequence
  Synthesized RNAi sequence
uaagcuucuugagcaguagcaa

SEQ ID NO: 9862 - RNA, 22 nt, Artificial Sequence
  Synthesized RNAi sequence
uaauguuguugagugcaucauu

SEQ ID NO: 9863 - RNA, 22 nt, Artificial Sequence
  Synthesized RNAi sequence
uaauuugacagcagaauuggcc

SEQ ID NO: 9864 - RNA, 22 nt, Artificial Sequence
  Synthesized RNAi sequence
uacaaccuguuggauuucccac

SEQ ID NO: 9865 - RNA, 22 nt, Artificial Sequence
  Synthesized RNAi sequence
uacaauaagaggccaugcuaaa

SEQ ID NO: 9866 - RNA, 22 nt, Artificial Sequence
  Synthesized RNAi sequence
uacauuugggucauagcuugau

SEQ ID NO: 9867 - RNA, 22 nt, Artificial Sequence
  Synthesized RNAi sequence
uacguugcauggcugcaucacg

SEQ ID NO: 9868 - RNA, 22 nt, Artificial Sequence
  Synthesized RNAi sequence
uacuaauuucacuaaguugaac

SEQ ID NO: 9869 - RNA, 22 nt, Artificial Sequence
  Synthesized RNAi sequence
uacuaucugcaucuacaaccug

SEQ ID NO: 9870 - RNA, 22 nt, Artificial Sequence
  Synthesized RNAi sequence
uagcaaaagcugcauaugaugg

SEQ ID NO: 9871 - RNA, 22 nt, Artificial Sequence
  Synthesized RNAi sequence
uagcaacagccugcucauaagc

SEQ ID NO: 9872 - RNA, 22 nt, Artificial Sequence
  Synthesized RNAi sequence
uagcacuaguaacuuuugcccu

SEQ ID NO: 9873 - RNA, 22 nt, Artificial Sequence
  Synthesized RNAi sequence
uagccuguuuauacauuugggu

SEQ ID NO: 9874 - RNA, 22 nt, Artificial Sequence
  Synthesized RNAi sequence
uaggugaauuguccauacuaau

SEQ ID NO: 9875 - RNA, 22 nt, Artificial Sequence
  Synthesized RNAi sequence
uaguaacuuuugcccucuuguc

SEQ ID NO: 9876 - RNA, 22 nt, Artificial Sequence
  Synthesized RNAi sequence
uagucugguaugacaaccauua

SEQ ID NO: 9877 - RNA, 22 nt, Artificial Sequence
  Synthesized RNAi sequence
uagugcaacaggacuaagcuca

SEQ ID NO: 9878 - RNA, 22 nt, Artificial Sequence
  Synthesized RNAi sequence
uaguuuggcugcuguuguaaga

SEQ ID NO: 9879 - RNA, 22 nt, Artificial Sequence
  Synthesized RNAi sequence
uauacauuugggucauagcuug

SEQ ID NO: 9880 - RNA, 22 nt, Artificial Sequence
  Synthesized RNAi sequence
uauccaacuuucuaagcauagu

SEQ ID NO: 9881 - RNA, 22 nt, Artificial Sequence
  Synthesized RNAi sequence
uaucugcaucuacaaccuguug

SEQ ID NO: 9882 - RNA, 22 nt, Artificial Sequence
  Synthesized RNAi sequence
uaugacaaccauuaguuuggcu

SEQ ID NO: 9883 - RNA, 22 nt, Artificial Sequence
  Synthesized RNAi sequence
uauguucaagggaacacaacca

SEQ ID NO: 9884 - RNA, 22 nt, Artificial Sequence
  Synthesized RNAi sequence
uauuauguucaagggaacacaa

SEQ ID NO: 9885 - RNA, 22 nt, Artificial Sequence
  Synthesized RNAi sequence
uauucuguaauuugacagcaga

SEQ ID NO: 9886 - RNA, 22 nt, Artificial Sequence
  Synthesized RNAi sequence
ucaaauucagauuuagccacau

SEQ ID NO: 9887 - RNA, 22 nt, Artificial Sequence
  Synthesized RNAi sequence
ucaagggaacacaaccaucucu

SEQ ID NO: 9888 - RNA, 22 nt, Artificial Sequence
  Synthesized RNAi sequence
ucaccauuagcaacagccugcu

SEQ ID NO: 9889 - RNA, 22 nt, Artificial Sequence
  Synthesized RNAi sequence
ucacggucaaauucagauuuag

SEQ ID NO: 9890 - RNA, 22 nt, Artificial Sequence
  Synthesized RNAi sequence
ucacuaaguugaacaauuuuac

SEQ ID NO: 9891 - RNA, 22 nt, Artificial Sequence
  Synthesized RNAi sequence
ucagaaucaccauuagcaacag

SEQ ID NO: 9892 - RNA, 22 nt, Artificial Sequence
  Synthesized RNAi sequence
ucagaucuagccuguuuauaca

SEQ ID NO: 9893 - RNA, 22 nt, Artificial Sequence
  Synthesized RNAi sequence
ucagauuuagccacauucaaag

SEQ ID NO: 9894 - RNA, 22 nt, Artificial Sequence
  Synthesized RNAi sequence
ucauaagcuucuugagcaguag

SEQ ID NO: 9895 - RNA, 22 nt, Artificial Sequence
  Synthesized RNAi sequence
ucauagcuugaucagccaucuu

SEQ ID NO: 9896 - RNA, 22 nt, Artificial Sequence
  Synthesized RNAi sequence
ucauuauccaacuuucuaagca

SEQ ID NO: 9897 - RNA, 22 nt, Artificial Sequence
  Synthesized RNAi sequence
ucauuauucuguaauuugacag

SEQ ID NO: 9898 - RNA, 22 nt, Artificial Sequence
  Synthesized RNAi sequence
uccaacuuacguugcauggcug

SEQ ID NO: 9899 - RNA, 22 nt, Artificial Sequence
  Synthesized RNAi sequence
uccaacuuucuaagcauaguga

SEQ ID NO: 9900 - RNA, 22 nt, Artificial Sequence
  Synthesized RNAi sequence
uccauacuaauuucacuaaguu

SEQ ID NO: 9901 - RNA, 22 nt, Artificial Sequence
  Synthesized RNAi sequence
ucccacaaugcugaugcauaag

SEQ ID NO: 9902 - RNA, 22 nt, Artificial Sequence
  Synthesized RNAi sequence
uccucagaucuagccuguuuau

SEQ ID NO: 9903 - RNA, 22 nt, Artificial Sequence
  Synthesized RNAi sequence
ucguagugcaacaggacuaagc

SEQ ID NO: 9904 - RNA, 22 nt, Artificial Sequence
  Synthesized RNAi sequence
ucuaagcauagugaaaagcauu

SEQ ID NO: 9905 - RNA, 22 nt, Artificial Sequence
  Synthesized RNAi sequence
ucuagccuguuuauacauuugg

SEQ ID NO: 9906 - RNA, 22 nt, Artificial Sequence
  Synthesized RNAi sequence
ucucuugcauuguugauaaugu

SEQ ID NO: 9907 - RNA, 22 nt, Artificial Sequence
  Synthesized RNAi sequence
ucugcauagcacuaguaacuuu

SEQ ID NO: 9908 - RNA, 22 nt, Artificial Sequence
  Synthesized RNAi sequence
ucugcaucuacaaccuguugga

SEQ ID NO: 9909 - RNA, 22 nt, Artificial Sequence
  Synthesized RNAi sequence
ucugguaugacaaccauuaguu

SEQ ID NO: 9910 - RNA, 22 nt, Artificial Sequence
  Synthesized RNAi sequence
ucuguaauuugacagcagaauu

SEQ ID NO: 9911 - RNA, 22 nt, Artificial Sequence
  Synthesized RNAi sequence
ucugucguagugcaacaggacu

SEQ ID NO: 9912 - RNA, 22 nt, Artificial Sequence
  Synthesized RNAi sequence
ucuugagcaguagcaaaagcug

SEQ ID NO: 9913 - RNA, 22 nt, Artificial Sequence
  Synthesized RNAi sequence
ucuugcauuguugauaauguug

SEQ ID NO: 9914 - RNA, 22 nt, Artificial Sequence
  Synthesized RNAi sequence
ucuuguccucagaucuagccug

SEQ ID NO: 9915 - RNA, 22 nt, Artificial Sequence
  Synthesized RNAi sequence
ucuuuuccaacuuacguugcau

SEQ ID NO: 9916 - RNA, 22 nt, Artificial Sequence
  Synthesized RNAi sequence
ugaaaagcauugucugcauagc

SEQ ID NO: 9917 - RNA, 22 nt, Artificial Sequence
  Synthesized RNAi sequence
ugaacaauuuuacuaucugcau

SEQ ID NO: 9918 - RNA, 22 nt, Artificial Sequence
  Synthesized RNAi sequence
ugaauuguccauacuaauuuca

SEQ ID NO: 9919 - RNA, 22 nt, Artificial Sequence
  Synthesized RNAi sequence
ugacaaccauuaguuuggcugc

SEQ ID NO: 9920 - RNA, 22 nt, Artificial Sequence
  Synthesized RNAi sequence
ugacagcagaauuggcccuuaa

SEQ ID NO: 9921 - RNA, 22 nt, Artificial Sequence
  Synthesized RNAi sequence
ugagcaguagcaaaagcugcau

SEQ ID NO: 9922 - RNA, 22 nt, Artificial Sequence
  Synthesized RNAi sequence
ugagugcaucauuauccaacuu

SEQ ID NO: 9923 - RNA, 22 nt, Artificial Sequence
  Synthesized RNAi sequence
ugauaauguuguugagugcauc

SEQ ID NO: 9924 - RNA, 22 nt, Artificial Sequence
  Synthesized RNAi sequence
ugaucagccaucuuuuccaacu

SEQ ID NO: 9925 - RNA, 22 nt, Artificial Sequence
  Synthesized RNAi sequence
ugaugcauaaguaaauguugua

SEQ ID NO: 9926 - RNA, 22 nt, Artificial Sequence
  Synthesized RNAi sequence
ugcaacaggacuaagcucauua

SEQ ID NO: 9927 - RNA, 22 nt, Artificial Sequence
  Synthesized RNAi sequence
ugcauaugauggaagggaacua

SEQ ID NO: 9928 - RNA, 22 nt, Artificial Sequence
  Synthesized RNAi sequence
ugcaucacggucaaauucagau

SEQ ID NO: 9929 - RNA, 22 nt, Artificial Sequence
  Synthesized RNAi sequence
ugcaucauuauccaacuuucua

SEQ ID NO: 9930 - RNA, 22 nt, Artificial Sequence
  Synthesized RNAi sequence
ugcaucuacaaccuguuggauu

SEQ ID NO: 9931 - RNA, 22 nt, Artificial Sequence
  Synthesized RNAi sequence
ugcauggcugcaucacggucaa

SEQ ID NO: 9932 - RNA, 22 nt, Artificial Sequence
  Synthesized RNAi sequence
ugcauuguugauaauguuguug

SEQ ID NO: 9933 - RNA, 22 nt, Artificial Sequence
  Synthesized RNAi sequence
ugcuaaauuaggugaauugucc

SEQ ID NO: 9934 - RNA, 22 nt, Artificial Sequence
  Synthesized RNAi sequence
ugcucauaagcuucuugagcag

SEQ ID NO: 9935 - RNA, 22 nt, Artificial Sequence
  Synthesized RNAi sequence
ugcugaugcauaaguaaauguu

SEQ ID NO: 9936 - RNA, 22 nt, Artificial Sequence
  Synthesized RNAi sequence
ugcuguuguaagagguauuaug

SEQ ID NO: 9937 - RNA, 22 nt, Artificial Sequence
  Synthesized RNAi sequence
uggauuucccacaaugcugaug

SEQ ID NO: 9938 - RNA, 22 nt, Artificial Sequence
  Synthesized RNAi sequence
uggcugcaucacggucaaauuc

SEQ ID NO: 9939 - RNA, 22 nt, Artificial Sequence
  Synthesized RNAi sequence
uggcugcuguuguaagagguau

SEQ ID NO: 9940 - RNA, 22 nt, Artificial Sequence
  Synthesized RNAi sequence
ugggucauagcuugaucagcca

SEQ ID NO: 9941 - RNA, 22 nt, Artificial Sequence
  Synthesized RNAi sequence
ugguaugacaaccauuaguuug

SEQ ID NO: 9942 - RNA, 22 nt, Artificial Sequence
  Synthesized RNAi sequence
uguaagagguauuauguucaag

SEQ ID NO: 9943 - RNA, 22 nt, Artificial Sequence
  Synthesized RNAi sequence
uguaauuugacagcagaauugg

SEQ ID NO: 9944 - RNA, 22 nt, Artificial Sequence
  Synthesized RNAi sequence
uguccauacuaauuucacuaag

SEQ ID NO: 9945 - RNA, 22 nt, Artificial Sequence
  Synthesized RNAi sequence
uguccucagaucuagccuguuu

SEQ ID NO: 9946 - RNA, 22 nt, Artificial Sequence
  Synthesized RNAi sequence
ugucguagugcaacaggacuaa

SEQ ID NO: 9947 - RNA, 22 nt, Artificial Sequence
  Synthesized RNAi sequence
ugucugcauagcacuaguaacu

SEQ ID NO: 9948 - RNA, 22 nt, Artificial Sequence
  Synthesized RNAi sequence
uguuacaauaagaggccaugcu

SEQ ID NO: 9949 - RNA, 22 nt, Artificial Sequence
  Synthesized RNAi sequence
uguucaagggaacacaaccauc

SEQ ID NO: 9950 - RNA, 22 nt, Artificial Sequence
  Synthesized RNAi sequence
uguugagugcaucauuauccaa

SEQ ID NO: 9951 - RNA, 22 nt, Artificial Sequence
  Synthesized RNAi sequence
uguugauaauguuguugagugc

SEQ ID NO: 9952 - RNA, 22 nt, Artificial Sequence
  Synthesized RNAi sequence
uguuguaagagguauuauguuc

SEQ ID NO: 9953 - RNA, 22 nt, Artificial Sequence
  Synthesized RNAi sequence
uguuguugagugcaucauuauc

SEQ ID NO: 9954 - RNA, 22 nt, Artificial Sequence
  Synthesized RNAi sequence
uguuuauacauuugggucauag

SEQ ID NO: 9955 - RNA, 22 nt, Artificial Sequence
  Synthesized RNAi sequence
uuaaagcuguuacaauaagagg

SEQ ID NO: 9956 - RNA, 22 nt, Artificial Sequence
  Synthesized RNAi sequence
uuacaauaagaggccaugcuaa

SEQ ID NO: 9957 - RNA, 22 nt, Artificial Sequence
  Synthesized RNAi sequence
uuacguugcauggcugcaucac

SEQ ID NO: 9958 - RNA, 22 nt, Artificial Sequence
  Synthesized RNAi sequence
uuacuaucugcaucuacaaccu

SEQ ID NO: 9959 - RNA, 22 nt, Artificial Sequence
  Synthesized RNAi sequence
uuagcaacagccugcucauaag

SEQ ID NO: 9960 - RNA, 22 nt, Artificial Sequence
  Synthesized RNAi sequence
uuaggugaauuguccauacuaa

SEQ ID NO: 9961 - RNA, 22 nt, Artificial Sequence
  Synthesized RNAi sequence
uuaguuuggcugcuguuguaag

SEQ ID NO: 9962 - RNA, 22 nt, Artificial Sequence
  Synthesized RNAi sequence
uuauacauuugggucauagcuu

SEQ ID NO: 9963 - RNA, 22 nt, Artificial Sequence
  Synthesized RNAi sequence
uuauccaacuuucuaagcauag

SEQ ID NO: 9964 - RNA, 22 nt, Artificial Sequence
  Synthesized RNAi sequence
uuauguucaagggaacacaacc

SEQ ID NO: 9965 - RNA, 22 nt, Artificial Sequence
  Synthesized RNAi sequence
uuauucuguaauuugacagcag

SEQ ID NO: 9966 - RNA, 22 nt, Artificial Sequence
  Synthesized RNAi sequence
uucaagggaacacaaccaucuc

SEQ ID NO: 9967 - RNA, 22 nt, Artificial Sequence
  Synthesized RNAi sequence
uucacuaaguugaacaauuuua

SEQ ID NO: 9968 - RNA, 22 nt, Artificial Sequence
  Synthesized RNAi sequence
uucagauuuagccacauucaaa

SEQ ID NO: 9969 - RNA, 22 nt, Artificial Sequence
  Synthesized RNAi sequence
uuccaacuuacguugcauggcu

SEQ ID NO: 9970 - RNA, 22 nt, Artificial Sequence
  Synthesized RNAi sequence
uucccacaaugcugaugcauaa

SEQ ID NO: 9971 - RNA, 22 nt, Artificial Sequence
  Synthesized RNAi sequence
uucuaagcauagugaaaagcau

SEQ ID NO: 9972 - RNA, 22 nt, Artificial Sequence
  Synthesized RNAi sequence
uucuguaauuugacagcagaau

SEQ ID NO: 9973 - RNA, 22 nt, Artificial Sequence
  Synthesized RNAi sequence
uucuugagcaguagcaaaagcu

SEQ ID NO: 9974 - RNA, 22 nt, Artificial Sequence
  Synthesized RNAi sequence
uugaacaauuuuacuaucugca

SEQ ID NO: 9975 - RNA, 22 nt, Artificial Sequence
  Synthesized RNAi sequence
uugacagcagaauuggcccuua

SEQ ID NO: 9976 - RNA, 22 nt, Artificial Sequence
  Synthesized RNAi sequence
uugagugcaucauuauccaacu

SEQ ID NO: 9977 - RNA, 22 nt, Artificial Sequence
  Synthesized RNAi sequence
uugauaauguuguugagugcau

SEQ ID NO: 9978 - RNA, 22 nt, Artificial Sequence
  Synthesized RNAi sequence
uugaucagccaucuuuuccaac

SEQ ID NO: 9979 - RNA, 22 nt, Artificial Sequence
  Synthesized RNAi sequence
uugcauggcugcaucacgguca

SEQ ID NO: 9980 - RNA, 22 nt, Artificial Sequence
  Synthesized RNAi sequence
uugcauuguugauaauguuguu

SEQ ID NO: 9981 - RNA, 22 nt, Artificial Sequence
  Synthesized RNAi sequence
uugcccucuuguccucagaucu

SEQ ID NO: 9982 - RNA, 22 nt, Artificial Sequence
  Synthesized RNAi sequence
uuggcccuuaaagcuguuacaa

SEQ ID NO: 9983 - RNA, 22 nt, Artificial Sequence
  Synthesized RNAi sequence
uuggcugcuguuguaagaggua

SEQ ID NO: 9984 - RNA, 22 nt, Artificial Sequence
  Synthesized RNAi sequence
uugggucauagcuugaucagcc

SEQ ID NO: 9985 - RNA, 22 nt, Artificial Sequence
  Synthesized RNAi sequence
uuguaagagguauuauguucaa

SEQ ID NO: 9986 - RNA, 22 nt, Artificial Sequence
  Synthesized RNAi sequence
uuguccauacuaauuucacuaa

SEQ ID NO: 9987 - RNA, 22 nt, Artificial Sequence
  Synthesized RNAi sequence
uuguccucagaucuagccuguu

SEQ ID NO: 9988 - RNA, 22 nt, Artificial Sequence
  Synthesized RNAi sequence
uugucugcauagcacuaguaac

SEQ ID NO: 9989 - RNA, 22 nt, Artificial Sequence
  Synthesized RNAi sequence
uuguugagugcaucauuaucca

SEQ ID NO: 9990 - RNA, 22 nt, Artificial Sequence
  Synthesized RNAi sequence
uuuacuaucugcaucuacaacc

SEQ ID NO: 9991 - RNA, 22 nt, Artificial Sequence
  Synthesized RNAi sequence
uuuauacauuugggucauagcu

SEQ ID NO: 9992 - RNA, 22 nt, Artificial Sequence
  Synthesized RNAi sequence
uuuccaacuuacguugcauggc

SEQ ID NO: 9993 - RNA, 22 nt, Artificial Sequence
  Synthesized RNAi sequence
uuucccacaaugcugaugcaua

SEQ ID NO: 9994 - RNA, 22 nt, Artificial Sequence
  Synthesized RNAi sequence
uuucuaagcauagugaaaagca

SEQ ID NO: 9995 - RNA, 22 nt, Artificial Sequence
  Synthesized RNAi sequence
uuugacagcagaauuggcccuu

SEQ ID NO: 9996 - RNA, 22 nt, Artificial Sequence
  Synthesized RNAi sequence
uuugcccucuuguccucagauc

SEQ ID NO: 9997 - RNA, 22 nt, Artificial Sequence
  Synthesized RNAi sequence
uuuggcugcuguuguaagaggu

SEQ ID NO: 9998 - RNA, 22 nt, Artificial Sequence
  Synthesized RNAi sequence
uuugggucauagcuugaucagc

SEQ ID NO: 9999 - RNA, 22 nt, Artificial Sequence
  Synthesized RNAi sequence
uuuuacuaucugcaucuacaac

SEQ ID NO: 10000 - RNA, 22 nt, Artificial Sequence
  Synthesized RNAi sequence
uuuuccaacuuacguugcaugg

SEQ ID NO: 10001 - RNA, 22 nt, Artificial Sequence
  Synthesized RNAi sequence
uuuugcccucuuguccucagau

SEQ ID NO: 10002 - RNA, 22 nt, Artificial Sequence
  Synthesized RNAi sequence
aaaccuacaaggugguuccagu

SEQ ID NO: 10003 - RNA, 22 nt, Artificial Sequence
  Synthesized RNAi sequence
aaaccuaccucccuuuguugug

SEQ ID NO: 10004 - RNA, 22 nt, Artificial Sequence
  Synthesized RNAi sequence
aaacuaccaaguaccauaccuc

SEQ ID NO: 10005 - RNA, 22 nt, Artificial Sequence
  Synthesized RNAi sequence
aaaguauaaauacuucacuuua

SEQ ID NO: 10006 - RNA, 22 nt, Artificial Sequence
  Synthesized RNAi sequence
aaauacuucacuuuaggaccuu

SEQ ID NO: 10007 - RNA, 22 nt, Artificial Sequence
  Synthesized RNAi sequence
aaauccuguaaaucggauaaca

SEQ ID NO: 10008 - RNA, 22 nt, Artificial Sequence
  Synthesized RNAi sequence
aaaucggauaacagugcaagua

SEQ ID NO: 10009 - RNA, 22 nt, Artificial Sequence
  Synthesized RNAi sequence
aacagugcaaguacaaaccuac

SEQ ID NO: 10010 - RNA, 22 nt, Artificial Sequence
  Synthesized RNAi sequence
aaccuacaaggugguuccaguu

SEQ ID NO: 10011 - RNA, 22 nt, Artificial Sequence
  Synthesized RNAi sequence
aaccuaccucccuuuguugugu

SEQ ID NO: 10012 - RNA, 22 nt, Artificial Sequence
  Synthesized RNAi sequence
aacgcauugucaucagugcaag

SEQ ID NO: 10013 - RNA, 22 nt, Artificial Sequence
  Synthesized RNAi sequence
aacuaccaaguaccauaccucu

SEQ ID NO: 10014 - RNA, 22 nt, Artificial Sequence
  Synthesized RNAi sequence
aagacaucugucguagugcaac

SEQ ID NO: 10015 - RNA, 22 nt, Artificial Sequence
  Synthesized RNAi sequence
aagcaguuuguguaguaccggc

SEQ ID NO: 10016 - RNA, 22 nt, Artificial Sequence
  Synthesized RNAi sequence
aagcuaacgcauugucaucagu

SEQ ID NO: 10017 - RNA, 22 nt, Artificial Sequence
  Synthesized RNAi sequence
aaggugguuccaguucuguaua

SEQ ID NO: 10018 - RNA, 22 nt, Artificial Sequence
  Synthesized RNAi sequence
aaguacaaaccuaccucccuuu

SEQ ID NO: 10019 - RNA, 22 nt, Artificial Sequence
  Synthesized RNAi sequence
aaguaccauaccucuauuuagg

SEQ ID NO: 10020 - RNA, 22 nt, Artificial Sequence
  Synthesized RNAi sequence
aaguauaaauacuucacuuuag

SEQ ID NO: 10021 - RNA, 22 nt, Artificial Sequence
  Synthesized RNAi sequence
aauacuucacuuuaggaccuuu

SEQ ID NO: 10022 - RNA, 22 nt, Artificial Sequence
  Synthesized RNAi sequence
aauccuguaaaucggauaacag

SEQ ID NO: 10023 - RNA, 22 nt, Artificial Sequence
  Synthesized RNAi sequence
aaucggauaacagugcaaguac

SEQ ID NO: 10024 - RNA, 22 nt, Artificial Sequence
  Synthesized RNAi sequence
aaucuagcccauuucaaauccu

SEQ ID NO: 10025 - RNA, 22 nt, Artificial Sequence
  Synthesized RNAi sequence
aauuggcaggcacuucuguugc

SEQ ID NO: 10026 - RNA, 22 nt, Artificial Sequence
  Synthesized RNAi sequence
acaaaccuaccucccuuuguug

SEQ ID NO: 10027 - RNA, 22 nt, Artificial Sequence
  Synthesized RNAi sequence
acaagacaucugucguagugca

SEQ ID NO: 10028 - RNA, 22 nt, Artificial Sequence
  Synthesized RNAi sequence
acaaggugguuccaguucugua

SEQ ID NO: 10029 - RNA, 22 nt, Artificial Sequence
  Synthesized RNAi sequence
acagugcaaguacaaaccuacc

SEQ ID NO: 10030 - RNA, 22 nt, Artificial Sequence
  Synthesized RNAi sequence
acaucugucguagugcaacagg

SEQ ID NO: 10031 - RNA, 22 nt, Artificial Sequence
  Synthesized RNAi sequence
accaaguaccauaccucuauuu

SEQ ID NO: 10032 - RNA, 22 nt, Artificial Sequence
  Synthesized RNAi sequence
accagcuuguagacguacugug

SEQ ID NO: 10033 - RNA, 22 nt, Artificial Sequence
  Synthesized RNAi sequence
accaguuccaucacucuuaggg

SEQ ID NO: 10034 - RNA, 22 nt, Artificial Sequence
  Synthesized RNAi sequence
accauaccucuauuuagguugu

SEQ ID NO: 10035 - RNA, 22 nt, Artificial Sequence
  Synthesized RNAi sequence
accggcagcacaagacaucugu

SEQ ID NO: 10036 - RNA, 22 nt, Artificial Sequence
  Synthesized RNAi sequence
accuacaaggugguuccaguuc

SEQ ID NO: 10037 - RNA, 22 nt, Artificial Sequence
  Synthesized RNAi sequence
accuaccucccuuuguuguguu

SEQ ID NO: 10038 - RNA, 22 nt, Artificial Sequence
  Synthesized RNAi sequence
accucccuuuguuguguuguag

SEQ ID NO: 10039 - RNA, 22 nt, Artificial Sequence
  Synthesized RNAi sequence
accucuauuuagguuguuuaau

SEQ ID NO: 10040 - RNA, 22 nt, Artificial Sequence
  Synthesized RNAi sequence
accuuuaggugugucuguaaca

SEQ ID NO: 10041 - RNA, 22 nt, Artificial Sequence
  Synthesized RNAi sequence
acgcauugucaucagugcaagc

SEQ ID NO: 10042 - RNA, 22 nt, Artificial Sequence
  Synthesized RNAi sequence
acguacuguggcagcuaaacua

SEQ ID NO: 10043 - RNA, 22 nt, Artificial Sequence
  Synthesized RNAi sequence
acuaccaaguaccauaccucua

SEQ ID NO: 10044 - RNA, 22 nt, Artificial Sequence
  Synthesized RNAi sequence
acucuuagggaaucuagcccau

SEQ ID NO: 10045 - RNA, 22 nt, Artificial Sequence
  Synthesized RNAi sequence
acuguggcagcuaaacuaccaa

SEQ ID NO: 10046 - RNA, 22 nt, Artificial Sequence
  Synthesized RNAi sequence
acuucacuuuaggaccuuuagg

SEQ ID NO: 10047 - RNA, 22 nt, Artificial Sequence
  Synthesized RNAi sequence
acuucuguugcauuaccagcuu

SEQ ID NO: 10048 - RNA, 22 nt, Artificial Sequence
  Synthesized RNAi sequence
acuuuaggaccuuuaggugugu

SEQ ID NO: 10049 - RNA, 22 nt, Artificial Sequence
  Synthesized RNAi sequence
agacaucugucguagugcaaca

SEQ ID NO: 10050 - RNA, 22 nt, Artificial Sequence
  Synthesized RNAi sequence
agacguacuguggcagcuaaac

SEQ ID NO: 10051 - RNA, 22 nt, Artificial Sequence
  Synthesized RNAi sequence
agauaguaccaguuccaucacu

SEQ ID NO: 10052 - RNA, 22 nt, Artificial Sequence
  Synthesized RNAi sequence
agcacaagacaucugucguagu

SEQ ID NO: 10053 - RNA, 22 nt, Artificial Sequence
  Synthesized RNAi sequence
agcaguuuguguaguaccggca

SEQ ID NO: 10054 - RNA, 22 nt, Artificial Sequence
  Synthesized RNAi sequence
agcccauuucaaauccuguaaa

SEQ ID NO: 10055 - RNA, 22 nt, Artificial Sequence
  Synthesized RNAi sequence
agcuaaacuaccaaguaccaua

SEQ ID NO: 10056 - RNA, 22 nt, Artificial Sequence
  Synthesized RNAi sequence
agcuaacgcauugucaucagug

SEQ ID NO: 10057 - RNA, 22 nt, Artificial Sequence
  Synthesized RNAi sequence
agcuuguagacguacuguggca

SEQ ID NO: 10058 - RNA, 22 nt, Artificial Sequence
  Synthesized RNAi sequence
aggaccuuuaggugugucugua

SEQ ID NO: 10059 - RNA, 22 nt, Artificial Sequence
  Synthesized RNAi sequence
aggcacuucuguugcauuacca

SEQ ID NO: 10060 - RNA, 22 nt, Artificial Sequence
  Synthesized RNAi sequence
agggaaucuagcccauuucaaa

SEQ ID NO: 10061 - RNA, 22 nt, Artificial Sequence
  Synthesized RNAi sequence
aggugguuccaguucuguauag

SEQ ID NO: 10062 - RNA, 22 nt, Artificial Sequence
  Synthesized RNAi sequence
aggugugucuguaacaaaccua

SEQ ID NO: 10063 - RNA, 22 nt, Artificial Sequence
  Synthesized RNAi sequence
agguuguuuaauccuuuaauaa

SEQ ID NO: 10064 - RNA, 22 nt, Artificial Sequence
  Synthesized RNAi sequence
aguaagcuaacgcauugucauc

SEQ ID NO: 10065 - RNA, 22 nt, Artificial Sequence
  Synthesized RNAi sequence
aguacaaaccuaccucccuuug

SEQ ID NO: 10066 - RNA, 22 nt, Artificial Sequence
  Synthesized RNAi sequence
aguaccaguuccaucacucuua

SEQ ID NO: 10067 - RNA, 22 nt, Artificial Sequence
  Synthesized RNAi sequence
aguaccauaccucuauuuaggu

SEQ ID NO: 10068 - RNA, 22 nt, Artificial Sequence
  Synthesized RNAi sequence
aguaccggcagcacaagacauc

SEQ ID NO: 10069 - RNA, 22 nt, Artificial Sequence
  Synthesized RNAi sequence
aguauaaauacuucacuuuagg

SEQ ID NO: 10070 - RNA, 22 nt, Artificial Sequence
  Synthesized RNAi sequence
agugcaagcaguuuguguagua

SEQ ID NO: 10071 - RNA, 22 nt, Artificial Sequence
  Synthesized RNAi sequence
agugcaaguacaaaccuaccuc

SEQ ID NO: 10072 - RNA, 22 nt, Artificial Sequence
  Synthesized RNAi sequence
aguuccaucacucuuagggaau

SEQ ID NO: 10073 - RNA, 22 nt, Artificial Sequence
  Synthesized RNAi sequence
aguucuguauagauaguaccag

SEQ ID NO: 10074 - RNA, 22 nt, Artificial Sequence
  Synthesized RNAi sequence
aguuuguguaguaccggcagca

SEQ ID NO: 10075 - RNA, 22 nt, Artificial Sequence
  Synthesized RNAi sequence
auaaaguauaaauacuucacuu

SEQ ID NO: 10076 - RNA, 22 nt, Artificial Sequence
  Synthesized RNAi sequence
auaaauacuucacuuuaggacc

SEQ ID NO: 10077 - RNA, 22 nt, Artificial Sequence
  Synthesized RNAi sequence
auaacagugcaaguacaaaccu

SEQ ID NO: 10078 - RNA, 22 nt, Artificial Sequence
  Synthesized RNAi sequence
auaccucuauuuagguuguuua

SEQ ID NO: 10079 - RNA, 22 nt, Artificial Sequence
  Synthesized RNAi sequence
auacuucacuuuaggaccuuua

SEQ ID NO: 10080 - RNA, 22 nt, Artificial Sequence
  Synthesized RNAi sequence
auagauaguaccaguuccauca

SEQ ID NO: 10081 - RNA, 22 nt, Artificial Sequence
  Synthesized RNAi sequence
auaguaccaguuccaucacucu

SEQ ID NO: 10082 - RNA, 22 nt, Artificial Sequence
  Synthesized RNAi sequence
aucacucuuagggaaucuagcc

SEQ ID NO: 10083 - RNA, 22 nt, Artificial Sequence
  Synthesized RNAi sequence
aucagugcaagcaguuugugua

SEQ ID NO: 10084 - RNA, 22 nt, Artificial Sequence
  Synthesized RNAi sequence
auccuguaaaucggauaacagu

SEQ ID NO: 10085 - RNA, 22 nt, Artificial Sequence
  Synthesized RNAi sequence
aucggauaacagugcaaguaca

SEQ ID NO: 10086 - RNA, 22 nt, Artificial Sequence
  Synthesized RNAi sequence
aucuagcccauuucaaauccug

SEQ ID NO: 10087 - RNA, 22 nt, Artificial Sequence
  Synthesized RNAi sequence
auuaccagcuuguagacguacu

SEQ ID NO: 10088 - RNA, 22 nt, Artificial Sequence
  Synthesized RNAi sequence
auuggcaggcacuucuguugca

SEQ ID NO: 10089 - RNA, 22 nt, Artificial Sequence
  Synthesized RNAi sequence
uaaacuaccaaguaccauaccu

SEQ ID NO: 10090 - RNA, 22 nt, Artificial Sequence
  Synthesized RNAi sequence
uaaaguauaaauacuucacuuu

SEQ ID NO: 10091 - RNA, 22 nt, Artificial Sequence
  Synthesized RNAi sequence
uaaauacuucacuuuaggaccu

SEQ ID NO: 10092 - RNA, 22 nt, Artificial Sequence
  Synthesized RNAi sequence
uaaaucggauaacagugcaagu

SEQ ID NO: 10093 - RNA, 22 nt, Artificial Sequence
  Synthesized RNAi sequence
uaacaaaccuacaaggugguuc

SEQ ID NO: 10094 - RNA, 22 nt, Artificial Sequence
  Synthesized RNAi sequence
uaacagugcaaguacaaaccua

SEQ ID NO: 10095 - RNA, 22 nt, Artificial Sequence
  Synthesized RNAi sequence
uaacgcauugucaucagugcaa

SEQ ID NO: 10096 - RNA, 22 nt, Artificial Sequence
  Synthesized RNAi sequence
uaagcuaacgcauugucaucag

SEQ ID NO: 10097 - RNA, 22 nt, Artificial Sequence
  Synthesized RNAi sequence
uaauaaaguauaaauacuucac

SEQ ID NO: 10098 - RNA, 22 nt, Artificial Sequence
  Synthesized RNAi sequence
uacaaaccuaccucccuuuguu

SEQ ID NO: 10099 - RNA, 22 nt, Artificial Sequence
  Synthesized RNAi sequence
uacaaggugguuccaguucugu

SEQ ID NO: 10100 - RNA, 22 nt, Artificial Sequence
  Synthesized RNAi sequence
uaccaaguaccauaccucuauu

SEQ ID NO: 10101 - RNA, 22 nt, Artificial Sequence
  Synthesized RNAi sequence
uaccagcuuguagacguacugu

SEQ ID NO: 10102 - RNA, 22 nt, Artificial Sequence
  Synthesized RNAi sequence
uaccaguuccaucacucuuagg

SEQ ID NO: 10103 - RNA, 22 nt, Artificial Sequence
  Synthesized RNAi sequence
uaccauaccucuauuuagguug

SEQ ID NO: 10104 - RNA, 22 nt, Artificial Sequence
  Synthesized RNAi sequence
uaccggcagcacaagacaucug

SEQ ID NO: 10105 - RNA, 22 nt, Artificial Sequence
  Synthesized RNAi sequence
uaccucccuuuguuguguugua

SEQ ID NO: 10106 - RNA, 22 nt, Artificial Sequence
  Synthesized RNAi sequence
uaccucuauuuagguuguuuaa

SEQ ID NO: 10107 - RNA, 22 nt, Artificial Sequence
  Synthesized RNAi sequence
uacuguggcagcuaaacuacca

SEQ ID NO: 10108 - RNA, 22 nt, Artificial Sequence
  Synthesized RNAi sequence
uacuucacuuuaggaccuuuag

SEQ ID NO: 10109 - RNA, 22 nt, Artificial Sequence
  Synthesized RNAi sequence
uagacguacuguggcagcuaaa

SEQ ID NO: 10110 - RNA, 22 nt, Artificial Sequence
  Synthesized RNAi sequence
uagauaguaccaguuccaucac

SEQ ID NO: 10111 - RNA, 22 nt, Artificial Sequence
  Synthesized RNAi sequence
uagcccauuucaaauccuguaa

SEQ ID NO: 10112 - RNA, 22 nt, Artificial Sequence
  Synthesized RNAi sequence
uaggaccuuuaggugugucugu

SEQ ID NO: 10113 - RNA, 22 nt, Artificial Sequence
  Synthesized RNAi sequence
uagggaaucuagcccauuucaa

SEQ ID NO: 10114 - RNA, 22 nt, Artificial Sequence
  Synthesized RNAi sequence
uaggugugucuguaacaaaccu

SEQ ID NO: 10115 - RNA, 22 nt, Artificial Sequence
  Synthesized RNAi sequence
uagguuguuuaauccuuuaaua

SEQ ID NO: 10116 - RNA, 22 nt, Artificial Sequence
  Synthesized RNAi sequence
uaguaagcuaacgcauugucau

SEQ ID NO: 10117 - RNA, 22 nt, Artificial Sequence
  Synthesized RNAi sequence
uaguaccaguuccaucacucuu

SEQ ID NO: 10118 - RNA, 22 nt, Artificial Sequence
  Synthesized RNAi sequence
uaguaccggcagcacaagacau

SEQ ID NO: 10119 - RNA, 22 nt, Artificial Sequence
  Synthesized RNAi sequence
uauaaauacuucacuuuaggac

SEQ ID NO: 10120 - RNA, 22 nt, Artificial Sequence
  Synthesized RNAi sequence
uauagauaguaccaguuccauc

SEQ ID NO: 10121 - RNA, 22 nt, Artificial Sequence
  Synthesized RNAi sequence
uauuuagguuguuuaauccuuu

SEQ ID NO: 10122 - RNA, 22 nt, Artificial Sequence
  Synthesized RNAi sequence
ucaaauccuguaaaucggauaa

SEQ ID NO: 10123 - RNA, 22 nt, Artificial Sequence
  Synthesized RNAi sequence
ucacucuuagggaaucuagccc

SEQ ID NO: 10124 - RNA, 22 nt, Artificial Sequence
  Synthesized RNAi sequence
ucacuuuaggaccuuuaggugu

SEQ ID NO: 10125 - RNA, 22 nt, Artificial Sequence
  Synthesized RNAi sequence
ucagugcaagcaguuuguguag

SEQ ID NO: 10126 - RNA, 22 nt, Artificial Sequence
  Synthesized RNAi sequence
ucaucagugcaagcaguuugug

SEQ ID NO: 10127 - RNA, 22 nt, Artificial Sequence
  Synthesized RNAi sequence
uccaguucuguauagauaguac

SEQ ID NO: 10128 - RNA, 22 nt, Artificial Sequence
  Synthesized RNAi sequence
uccaucacucuuagggaaucua

SEQ ID NO: 10129 - RNA, 22 nt, Artificial Sequence
  Synthesized RNAi sequence
ucccuuuguuguguuguaguaa

SEQ ID NO: 10130 - RNA, 22 nt, Artificial Sequence
  Synthesized RNAi sequence
uccuguaaaucggauaacagug

SEQ ID NO: 10131 - RNA, 22 nt, Artificial Sequence
  Synthesized RNAi sequence
ucggauaacagugcaaguacaa

SEQ ID NO: 10132 - RNA, 22 nt, Artificial Sequence
  Synthesized RNAi sequence
ucuagcccauuucaaauccugu

SEQ ID NO: 10133 - RNA, 22 nt, Artificial Sequence
  Synthesized RNAi sequence
ucuauuuagguuguuuaauccu

SEQ ID NO: 10134 - RNA, 22 nt, Artificial Sequence
  Synthesized RNAi sequence
ucuguaacaaaccuacaaggug

SEQ ID NO: 10135 - RNA, 22 nt, Artificial Sequence
  Synthesized RNAi sequence
ucuguauagauaguaccaguuc

SEQ ID NO: 10136 - RNA, 22 nt, Artificial Sequence
  Synthesized RNAi sequence
ucuguugcauuaccagcuugua

SEQ ID NO: 10137 - RNA, 22 nt, Artificial Sequence
  Synthesized RNAi sequence
ucuuagggaaucuagcccauuu

SEQ ID NO: 10138 - RNA, 22 nt, Artificial Sequence
  Synthesized RNAi sequence
ugaauuggcaggcacuucuguu

SEQ ID NO: 10139 - RNA, 22 nt, Artificial Sequence
  Synthesized RNAi sequence
ugcaagcaguuuguguaguacc

SEQ ID NO: 10140 - RNA, 22 nt, Artificial Sequence
  Synthesized RNAi sequence
ugcaaguacaaaccuaccuccc

SEQ ID NO: 10141 - RNA, 22 nt, Artificial Sequence
  Synthesized RNAi sequence
ugcauuaccagcuuguagacgu

SEQ ID NO: 10142 - RNA, 22 nt, Artificial Sequence
  Synthesized RNAi sequence
uggcagcuaaacuaccaaguac

SEQ ID NO: 10143 - RNA, 22 nt, Artificial Sequence
  Synthesized RNAi sequence
uggcaggcacuucuguugcauu

SEQ ID NO: 10144 - RNA, 22 nt, Artificial Sequence
  Synthesized RNAi sequence
ugguuccaguucuguauagaua

SEQ ID NO: 10145 - RNA, 22 nt, Artificial Sequence
  Synthesized RNAi sequence
uguaaaucggauaacagugcaa

SEQ ID NO: 10146 - RNA, 22 nt, Artificial Sequence
  Synthesized RNAi sequence
uguaacaaaccuacaagguggu

SEQ ID NO: 10147 - RNA, 22 nt, Artificial Sequence
  Synthesized RNAi sequence
uguagacguacuguggcagcua

SEQ ID NO: 10148 - RNA, 22 nt, Artificial Sequence
  Synthesized RNAi sequence
uguaguaagcuaacgcauuguc

SEQ ID NO: 10149 - RNA, 22 nt, Artificial Sequence
  Synthesized RNAi sequence
uguaguaccggcagcacaagac

SEQ ID NO: 10150 - RNA, 22 nt, Artificial Sequence
  Synthesized RNAi sequence
uguauagauaguaccaguucca

SEQ ID NO: 10151 - RNA, 22 nt, Artificial Sequence
  Synthesized RNAi sequence
uguggcagcuaaacuaccaagu

SEQ ID NO: 10152 - RNA, 22 nt, Artificial Sequence
  Synthesized RNAi sequence
uguguaguaccggcagcacaag

SEQ ID NO: 10153 - RNA, 22 nt, Artificial Sequence
  Synthesized RNAi sequence
ugugucuguaacaaaccuacaa

SEQ ID NO: 10154 - RNA, 22 nt, Artificial Sequence
  Synthesized RNAi sequence
uguguuguaguaagcuaacgca

SEQ ID NO: 10155 - RNA, 22 nt, Artificial Sequence
  Synthesized RNAi sequence
uguuguaguaagcuaacgcauu

SEQ ID NO: 10156 - RNA, 22 nt, Artificial Sequence
  Synthesized RNAi sequence
uguuguguuguaguaagcuaac

SEQ ID NO: 10157 - RNA, 22 nt, Artificial Sequence
  Synthesized RNAi sequence
uguuuaauccuuuaauaaagua

SEQ ID NO: 10158 - RNA, 22 nt, Artificial Sequence
  Synthesized RNAi sequence
uuaccagcuuguagacguacug

SEQ ID NO: 10159 - RNA, 22 nt, Artificial Sequence
  Synthesized RNAi sequence
uuaggaccuuuaggugugucug

SEQ ID NO: 10160 - RNA, 22 nt, Artificial Sequence
  Synthesized RNAi sequence
uuagggaaucuagcccauuuca

SEQ ID NO: 10161 - RNA, 22 nt, Artificial Sequence
  Synthesized RNAi sequence
uuaggugugucuguaacaaacc

SEQ ID NO: 10162 - RNA, 22 nt, Artificial Sequence
  Synthesized RNAi sequence
uucaaauccuguaaaucggaua

SEQ ID NO: 10163 - RNA, 22 nt, Artificial Sequence
  Synthesized RNAi sequence
uucacuuuaggaccuuuaggug

SEQ ID NO: 10164 - RNA, 22 nt, Artificial Sequence
  Synthesized RNAi sequence
uuccaguucuguauagauagua

SEQ ID NO: 10165 - RNA, 22 nt, Artificial Sequence
  Synthesized RNAi sequence
uuccaucacucuuagggaaucu

SEQ ID NO: 10166 - RNA, 22 nt, Artificial Sequence
  Synthesized RNAi sequence
uucuguauagauaguaccaguu

SEQ ID NO: 10167 - RNA, 22 nt, Artificial Sequence
  Synthesized RNAi sequence
uucuguugcauuaccagcuugu

SEQ ID NO: 10168 - RNA, 22 nt, Artificial Sequence
  Synthesized RNAi sequence
uugcauuaccagcuuguagacg

SEQ ID NO: 10169 - RNA, 22 nt, Artificial Sequence
  Synthesized RNAi sequence
uuggcaggcacuucuguugcau

SEQ ID NO: 10170 - RNA, 22 nt, Artificial Sequence
  Synthesized RNAi sequence
uuguagacguacuguggcagcu

SEQ ID NO: 10171 - RNA, 22 nt, Artificial Sequence
  Synthesized RNAi sequence
uuguaguaagcuaacgcauugu

SEQ ID NO: 10172 - RNA, 22 nt, Artificial Sequence
  Synthesized RNAi sequence
uugucaucagugcaagcaguuu

SEQ ID NO: 10173 - RNA, 22 nt, Artificial Sequence
  Synthesized RNAi sequence
uuguguaguaccggcagcacaa

SEQ ID NO: 10174 - RNA, 22 nt, Artificial Sequence
  Synthesized RNAi sequence
uuguguuguaguaagcuaacgc

SEQ ID NO: 10175 - RNA, 22 nt, Artificial Sequence
  Synthesized RNAi sequence
uuguuguguuguaguaagcuaa

SEQ ID NO: 10176 - RNA, 22 nt, Artificial Sequence
  Synthesized RNAi sequence
uuguuuaauccuuuaauaaagu

SEQ ID NO: 10177 - RNA, 22 nt, Artificial Sequence
  Synthesized RNAi sequence
uuuaggaccuuuaggugugucu

SEQ ID NO: 10178 - RNA, 22 nt, Artificial Sequence
  Synthesized RNAi sequence
uuuaggugugucuguaacaaac

SEQ ID NO: 10179 - RNA, 22 nt, Artificial Sequence
  Synthesized RNAi sequence
uuuagguuguuuaauccuuuaa

SEQ ID NO: 10180 - RNA, 22 nt, Artificial Sequence
  Synthesized RNAi sequence
uuuguguaguaccggcagcaca

SEQ ID NO: 10181 - RNA, 22 nt, Artificial Sequence
  Synthesized RNAi sequence
uuuguuguguuguaguaagcua

SEQ ID NO: 10182 - RNA, 22 nt, Artificial Sequence
  Synthesized RNAi sequence
aaagauugcuaugugagauuaa

SEQ ID NO: 10183 - RNA, 22 nt, Artificial Sequence
  Synthesized RNAi sequence
aaaguuaacuacaucuacuugu

SEQ ID NO: 10184 - RNA, 22 nt, Artificial Sequence
  Synthesized RNAi sequence
aacuacaucuacuugugcuaug

SEQ ID NO: 10185 - RNA, 22 nt, Artificial Sequence
  Synthesized RNAi sequence
aagauugcuaugugagauuaaa

SEQ ID NO: 10186 - RNA, 22 nt, Artificial Sequence
  Synthesized RNAi sequence
aaguuaacuacaucuacuugug

SEQ ID NO: 10187 - RNA, 22 nt, Artificial Sequence
  Synthesized RNAi sequence
aauguuacacacugauuaaaga

SEQ ID NO: 10188 - RNA, 22 nt, Artificial Sequence
  Synthesized RNAi sequence
acacacugauuaaagauugcua

SEQ ID NO: 10189 - RNA, 22 nt, Artificial Sequence
  Synthesized RNAi sequence
acacugauuaaagauugcuaug

SEQ ID NO: 10190 - RNA, 22 nt, Artificial Sequence
  Synthesized RNAi sequence
acuauauaucguaaacggaaaa

SEQ ID NO: 10191 - RNA, 22 nt, Artificial Sequence
  Synthesized RNAi sequence
acugauuaaagauugcuaugug

SEQ ID NO: 10192 - RNA, 22 nt, Artificial Sequence
  Synthesized RNAi sequence
agacuauauaucguaaacggaa

SEQ ID NO: 10193 - RNA, 22 nt, Artificial Sequence
  Synthesized RNAi sequence
agauuaaaguuaacuacaucua

SEQ ID NO: 10194 - RNA, 22 nt, Artificial Sequence
  Synthesized RNAi sequence
agauugcuaugugagauuaaag

SEQ ID NO: 10195 - RNA, 22 nt, Artificial Sequence
  Synthesized RNAi sequence
aguagacuauauaucguaaacg

SEQ ID NO: 10196 - RNA, 22 nt, Artificial Sequence
  Synthesized RNAi sequence
aguccucccuaauguuacacac

SEQ ID NO: 10197 - RNA, 22 nt, Artificial Sequence
  Synthesized RNAi sequence
aguuaacuacaucuacuugugc

SEQ ID NO: 10198 - RNA, 22 nt, Artificial Sequence
  Synthesized RNAi sequence
auauaucguaaacggaaaagcg

SEQ ID NO: 10199 - RNA, 22 nt, Artificial Sequence
  Synthesized RNAi sequence
auaucguaaacggaaaagcgaa

SEQ ID NO: 10200 - RNA, 22 nt, Artificial Sequence
  Synthesized RNAi sequence
aucguaaacggaaaagcgaaaa

SEQ ID NO: 10201 - RNA, 22 nt, Artificial Sequence
  Synthesized RNAi sequence
augugagauuaaaguuaacuac

SEQ ID NO: 10202 - RNA, 22 nt, Artificial Sequence
  Synthesized RNAi sequence
auguuacacacugauuaaagau

SEQ ID NO: 10203 - RNA, 22 nt, Artificial Sequence
  Synthesized RNAi sequence
auuaaagauugcuaugugagau

SEQ ID NO: 10204 - RNA, 22 nt, Artificial Sequence
  Synthesized RNAi sequence
auuaaaguuaacuacaucuacu

SEQ ID NO: 10205 - RNA, 22 nt, Artificial Sequence
  Synthesized RNAi sequence
auugcuaugugagauuaaaguu

SEQ ID NO: 10206 - RNA, 22 nt, Artificial Sequence
  Synthesized RNAi sequence
uaaagauugcuaugugagauua

SEQ ID NO: 10207 - RNA, 22 nt, Artificial Sequence
  Synthesized RNAi sequence
uaaaguuaacuacaucuacuug

SEQ ID NO: 10208 - RNA, 22 nt, Artificial Sequence
  Synthesized RNAi sequence
uaacuacaucuacuugugcuau

SEQ ID NO: 10209 - RNA, 22 nt, Artificial Sequence
  Synthesized RNAi sequence
uaauguuacacacugauuaaag

SEQ ID NO: 10210 - RNA, 22 nt, Artificial Sequence
  Synthesized RNAi sequence
uacacacugauuaaagauugcu

SEQ ID NO: 10211 - RNA, 22 nt, Artificial Sequence
  Synthesized RNAi sequence
uagacuauauaucguaaacgga

SEQ ID NO: 10212 - RNA, 22 nt, Artificial Sequence
  Synthesized RNAi sequence
uauauaucguaaacggaaaagc

SEQ ID NO: 10213 - RNA, 22 nt, Artificial Sequence
  Synthesized RNAi sequence
uauaucguaaacggaaaagcga

SEQ ID NO: 10214 - RNA, 22 nt, Artificial Sequence
  Synthesized RNAi sequence
uaucguaaacggaaaagcgaaa

SEQ ID NO: 10215 - RNA, 22 nt, Artificial Sequence
  Synthesized RNAi sequence
uaugugagauuaaaguuaacua

SEQ ID NO: 10216 - RNA, 22 nt, Artificial Sequence
  Synthesized RNAi sequence
ucccuaauguuacacacugauu

SEQ ID NO: 10217 - RNA, 22 nt, Artificial Sequence
  Synthesized RNAi sequence
uccucccuaauguuacacacug

SEQ ID NO: 10218 - RNA, 22 nt, Artificial Sequence
  Synthesized RNAi sequence
ucguaaacggaaaagcgaaaac

SEQ ID NO: 10219 - RNA, 22 nt, Artificial Sequence
  Synthesized RNAi sequence
ugagauuaaaguuaacuacauc

SEQ ID NO: 10220 - RNA, 22 nt, Artificial Sequence
  Synthesized RNAi sequence
ugauuaaagauugcuaugugag

SEQ ID NO: 10221 - RNA, 22 nt, Artificial Sequence
  Synthesized RNAi sequence
ugcuaugugagauuaaaguuaa

SEQ ID NO: 10222 - RNA, 22 nt, Artificial Sequence
  Synthesized RNAi sequence
ugugagauuaaaguuaacuaca

SEQ ID NO: 10223 - RNA, 22 nt, Artificial Sequence
  Synthesized RNAi sequence
uguuacacacugauuaaagauu

SEQ ID NO: 10224 - RNA, 22 nt, Artificial Sequence
  Synthesized RNAi sequence
uuaaagauugcuaugugagauu

SEQ ID NO: 10225 - RNA, 22 nt, Artificial Sequence
  Synthesized RNAi sequence
uuaaaguuaacuacaucuacuu

SEQ ID NO: 10226 - RNA, 22 nt, Artificial Sequence
  Synthesized RNAi sequence
uuaacuacaucuacuugugcua

SEQ ID NO: 10227 - RNA, 22 nt, Artificial Sequence
  Synthesized RNAi sequence
uuacacacugauuaaagauugc

SEQ ID NO: 10228 - RNA, 22 nt, Artificial Sequence
  Synthesized RNAi sequence
uugcuaugugagauuaaaguua

SEQ ID NO: 10229 - RNA, 22 nt, Artificial Sequence
  Synthesized RNAi sequence
aaacaaagugaacacccuugga

SEQ ID NO: 10230 - RNA, 22 nt, Artificial Sequence
  Synthesized RNAi sequence
aaacaacaacagcaaguugcaa

SEQ ID NO: 10231 - RNA, 22 nt, Artificial Sequence
  Synthesized RNAi sequence
aaacuguuacaaacaacaacag

SEQ ID NO: 10232 - RNA, 22 nt, Artificial Sequence
  Synthesized RNAi sequence
aaagaaaauaguuggcaucaua

SEQ ID NO: 10233 - RNA, 22 nt, Artificial Sequence
  Synthesized RNAi sequence
aaagcauaaagauagagaaaag

SEQ ID NO: 10234 - RNA, 22 nt, Artificial Sequence
  Synthesized RNAi sequence
aaagccaaagccucauuauuau

SEQ ID NO: 10235 - RNA, 22 nt, Artificial Sequence
  Synthesized RNAi sequence
aaagccucauuauuauucuuac

SEQ ID NO: 10236 - RNA, 22 nt, Artificial Sequence
  Synthesized RNAi sequence
aaaggcacgcuaguagucgucg

SEQ ID NO: 10237 - RNA, 22 nt, Artificial Sequence
  Synthesized RNAi sequence
aaagggagugaggcuuguaucg

SEQ ID NO: 10238 - RNA, 22 nt, Artificial Sequence
  Synthesized RNAi sequence
aaaggggcuucaaggccagcag

SEQ ID NO: 10239 - RNA, 22 nt, Artificial Sequence
  Synthesized RNAi sequence
aaaggugugaguaaacuguuac

SEQ ID NO: 10240 - RNA, 22 nt, Artificial Sequence
  Synthesized RNAi sequence
aaaguuuauacucugcaagaag

SEQ ID NO: 10241 - RNA, 22 nt, Artificial Sequence
  Synthesized RNAi sequence
aaauaggacuuguugugccauc

SEQ ID NO: 10242 - RNA, 22 nt, Artificial Sequence
  Synthesized RNAi sequence
aaaucugaaggaguagcauccu

SEQ ID NO: 10243 - RNA, 22 nt, Artificial Sequence
  Synthesized RNAi sequence
aaauugguuccauuacuggauu

SEQ ID NO: 10244 - RNA, 22 nt, Artificial Sequence
  Synthesized RNAi sequence
aacaaaaucugaaggaguagca

SEQ ID NO: 10245 - RNA, 22 nt, Artificial Sequence
  Synthesized RNAi sequence
aacaaagugaacacccuuggag

SEQ ID NO: 10246 - RNA, 22 nt, Artificial Sequence
  Synthesized RNAi sequence
aacaacaacagcaaguugcaaa

SEQ ID NO: 10247 - RNA, 22 nt, Artificial Sequence
  Synthesized RNAi sequence
aacaacagcaaguugcaaacaa

SEQ ID NO: 10248 - RNA, 22 nt, Artificial Sequence
  Synthesized RNAi sequence
aacaacuccggaugaaccgucg

SEQ ID NO: 10249 - RNA, 22 nt, Artificial Sequence
  Synthesized RNAi sequence
aacaauaagccauccgaaaggg

SEQ ID NO: 10250 - RNA, 22 nt, Artificial Sequence
  Synthesized RNAi sequence
aacaauuaguaugccagcaaag

SEQ ID NO: 10251 - RNA, 22 nt, Artificial Sequence
  Synthesized RNAi sequence
aacagcaaguugcaaacaaagu

SEQ ID NO: 10252 - RNA, 22 nt, Artificial Sequence
  Synthesized RNAi sequence
aaccgucgauugugugaauuug

SEQ ID NO: 10253 - RNA, 22 nt, Artificial Sequence
  Synthesized RNAi sequence
aacgagcaaaaggugugaguaa

SEQ ID NO: 10254 - RNA, 22 nt, Artificial Sequence
  Synthesized RNAi sequence
aacgccaacaauaagccauccg

SEQ ID NO: 10255 - RNA, 22 nt, Artificial Sequence
  Synthesized RNAi sequence
aacuccggaugaaccgucgauu

SEQ ID NO: 10256 - RNA, 22 nt, Artificial Sequence
  Synthesized RNAi sequence
aacuguguaauacaacacaguc

SEQ ID NO: 10257 - RNA, 22 nt, Artificial Sequence
  Synthesized RNAi sequence
aacuguuacaaacaacaacagc

SEQ ID NO: 10258 - RNA, 22 nt, Artificial Sequence
  Synthesized RNAi sequence
aagaagguaacauguucaacac

SEQ ID NO: 10259 - RNA, 22 nt, Artificial Sequence
  Synthesized RNAi sequence
aagaaguagacuaaagcauaaa

SEQ ID NO: 10260 - RNA, 22 nt, Artificial Sequence
  Synthesized RNAi sequence
aagauagagaaaaggggcuuca

SEQ ID NO: 10261 - RNA, 22 nt, Artificial Sequence
  Synthesized RNAi sequence
aagcauaaagauagagaaaagg

SEQ ID NO: 10262 - RNA, 22 nt, Artificial Sequence
  Synthesized RNAi sequence
aagccaaagccucauuauuauu

SEQ ID NO: 10263 - RNA, 22 nt, Artificial Sequence
  Synthesized RNAi sequence
aagccauccgaaagggagugag

SEQ ID NO: 10264 - RNA, 22 nt, Artificial Sequence
  Synthesized RNAi sequence
aagccucauuauuauucuuaca

SEQ ID NO: 10265 - RNA, 22 nt, Artificial Sequence
  Synthesized RNAi sequence
aaggaguagcauccuugauuuc

SEQ ID NO: 10266 - RNA, 22 nt, Artificial Sequence
  Synthesized RNAi sequence
aaggcacgcuaguagucgucgu

SEQ ID NO: 10267 - RNA, 22 nt, Artificial Sequence
  Synthesized RNAi sequence
aaggccagcagcaacgagcaaa

SEQ ID NO: 10268 - RNA, 22 nt, Artificial Sequence
  Synthesized RNAi sequence
aagggagugaggcuuguaucgg

SEQ ID NO: 10269 - RNA, 22 nt, Artificial Sequence
  Synthesized RNAi sequence
aagguauacaauagucguaaca

SEQ ID NO: 10270 - RNA, 22 nt, Artificial Sequence
  Synthesized RNAi sequence
aaggugugaguaaacuguuaca

SEQ ID NO: 10271 - RNA, 22 nt, Artificial Sequence
  Synthesized RNAi sequence
aaguaacuguguaauacaacac

SEQ ID NO: 10272 - RNA, 22 nt, Artificial Sequence
  Synthesized RNAi sequence
aaguagacuaaagcauaaagau

SEQ ID NO: 10273 - RNA, 22 nt, Artificial Sequence
  Synthesized RNAi sequence
aagugaacacccuuggagagug

SEQ ID NO: 10274 - RNA, 22 nt, Artificial Sequence
  Synthesized RNAi sequence
aagugaaguaacuguguaauac

SEQ ID NO: 10275 - RNA, 22 nt, Artificial Sequence
  Synthesized RNAi sequence
aaguucguacucaucagcuugu

SEQ ID NO: 10276 - RNA, 22 nt, Artificial Sequence
  Synthesized RNAi sequence
aaguugcaaacaaagugaacac

SEQ ID NO: 10277 - RNA, 22 nt, Artificial Sequence
  Synthesized RNAi sequence
aaguuuauacucugcaagaagu

SEQ ID NO: 10278 - RNA, 22 nt, Artificial Sequence
  Synthesized RNAi sequence
aauaagccauccgaaagggagu

SEQ ID NO: 10279 - RNA, 22 nt, Artificial Sequence
  Synthesized RNAi sequence
aauacaacacagucuuuuacuc

SEQ ID NO: 10280 - RNA, 22 nt, Artificial Sequence
  Synthesized RNAi sequence
aauaggacuuguugugccauca

SEQ ID NO: 10281 - RNA, 22 nt, Artificial Sequence
  Synthesized RNAi sequence
aauagucguaacaauuaguaug

SEQ ID NO: 10282 - RNA, 22 nt, Artificial Sequence
  Synthesized RNAi sequence
aauagucugaagugaaguaacu

SEQ ID NO: 10283 - RNA, 22 nt, Artificial Sequence
  Synthesized RNAi sequence
aaucugaaggaguagcauccuu

SEQ ID NO: 10284 - RNA, 22 nt, Artificial Sequence
  Synthesized RNAi sequence
aaucugguagucauguucagaa

SEQ ID NO: 10285 - RNA, 22 nt, Artificial Sequence
  Synthesized RNAi sequence
aaugaguacauaaguucguacu

SEQ ID NO: 10286 - RNA, 22 nt, Artificial Sequence
  Synthesized RNAi sequence
aauuaguaugccagcaaagaaa

SEQ ID NO: 10287 - RNA, 22 nt, Artificial Sequence
  Synthesized RNAi sequence
aauugguuccauuacuggauua

SEQ ID NO: 10288 - RNA, 22 nt, Artificial Sequence
  Synthesized RNAi sequence
aauuuggacauguucuucaggc

SEQ ID NO: 10289 - RNA, 22 nt, Artificial Sequence
  Synthesized RNAi sequence
aauuuuauuguagaugaagaag

SEQ ID NO: 10290 - RNA, 22 nt, Artificial Sequence
  Synthesized RNAi sequence
acaaaaucugaaggaguagcau

SEQ ID NO: 10291 - RNA, 22 nt, Artificial Sequence
  Synthesized RNAi sequence
acaaacaacaacagcaaguugc

SEQ ID NO: 10292 - RNA, 22 nt, Artificial Sequence
  Synthesized RNAi sequence
acaaaggcacgcuaguagucgu

SEQ ID NO: 10293 - RNA, 22 nt, Artificial Sequence
  Synthesized RNAi sequence
acaaagugaacacccuuggaga

SEQ ID NO: 10294 - RNA, 22 nt, Artificial Sequence
  Synthesized RNAi sequence
acaaaguuuauacucugcaaga

SEQ ID NO: 10295 - RNA, 22 nt, Artificial Sequence
  Synthesized RNAi sequence
acaacaacagcaaguugcaaac

SEQ ID NO: 10296 - RNA, 22 nt, Artificial Sequence
  Synthesized RNAi sequence
acaacagcaaguugcaaacaaa

SEQ ID NO: 10297 - RNA, 22 nt, Artificial Sequence
  Synthesized RNAi sequence
acaacuccggaugaaccgucga

SEQ ID NO: 10298 - RNA, 22 nt, Artificial Sequence
  Synthesized RNAi sequence
acaauaagccauccgaaaggga

SEQ ID NO: 10299 - RNA, 22 nt, Artificial Sequence
  Synthesized RNAi sequence
acaauagucguaacaauuagua

SEQ ID NO: 10300 - RNA, 22 nt, Artificial Sequence
  Synthesized RNAi sequence
acaauuaguaugccagcaaaga

SEQ ID NO: 10301 - RNA, 22 nt, Artificial Sequence
  Synthesized RNAi sequence
acagcaaguugcaaacaaagug

SEQ ID NO: 10302 - RNA, 22 nt, Artificial Sequence
  Synthesized RNAi sequence
acauaaguucguacucaucagc

SEQ ID NO: 10303 - RNA, 22 nt, Artificial Sequence
  Synthesized RNAi sequence
acauguucuucaggcucaucaa

SEQ ID NO: 10304 - RNA, 22 nt, Artificial Sequence
  Synthesized RNAi sequence
accaaucugguagucauguuca

SEQ ID NO: 10305 - RNA, 22 nt, Artificial Sequence
  Synthesized RNAi sequence
accgucgauugugugaauuugg

SEQ ID NO: 10306 - RNA, 22 nt, Artificial Sequence
  Synthesized RNAi sequence
acgagcaaaaggugugaguaaa

SEQ ID NO: 10307 - RNA, 22 nt, Artificial Sequence
  Synthesized RNAi sequence
acgccaacaauaagccauccga

SEQ ID NO: 10308 - RNA, 22 nt, Artificial Sequence
  Synthesized RNAi sequence
acgcuaguagucgucgucgguu

SEQ ID NO: 10309 - RNA, 22 nt, Artificial Sequence
  Synthesized RNAi sequence
acuaaagcauaaagauagagaa

SEQ ID NO: 10310 - RNA, 22 nt, Artificial Sequence
  Synthesized RNAi sequence
acuauuguaagguauacaauag

SEQ ID NO: 10311 - RNA, 22 nt, Artificial Sequence
  Synthesized RNAi sequence
acucaucagcuugugcuuacaa

SEQ ID NO: 10312 - RNA, 22 nt, Artificial Sequence
  Synthesized RNAi sequence
acuccggaugaaccgucgauug

SEQ ID NO: 10313 - RNA, 22 nt, Artificial Sequence
  Synthesized RNAi sequence
acucugcaagaaguagacuaaa

SEQ ID NO: 10314 - RNA, 22 nt, Artificial Sequence
  Synthesized RNAi sequence
acuggauuaacaacuccggaug

SEQ ID NO: 10315 - RNA, 22 nt, Artificial Sequence
  Synthesized RNAi sequence
acuguguaauacaacacagucu

SEQ ID NO: 10316 - RNA, 22 nt, Artificial Sequence
  Synthesized RNAi sequence
acuguuacaaacaacaacagca

SEQ ID NO: 10317 - RNA, 22 nt, Artificial Sequence
  Synthesized RNAi sequence
agaaaaggggcuucaaggccag

SEQ ID NO: 10318 - RNA, 22 nt, Artificial Sequence
  Synthesized RNAi sequence
agaaauaggacuuguugugcca

SEQ ID NO: 10319 - RNA, 22 nt, Artificial Sequence
  Synthesized RNAi sequence
agaagguaacauguucaacacc

SEQ ID NO: 10320 - RNA, 22 nt, Artificial Sequence
  Synthesized RNAi sequence
agaaguagacuaaagcauaaag

SEQ ID NO: 10321 - RNA, 22 nt, Artificial Sequence
  Synthesized RNAi sequence
agacuaaagcauaaagauagag

SEQ ID NO: 10322 - RNA, 22 nt, Artificial Sequence
  Synthesized RNAi sequence
agagaaaaggggcuucaaggcc

SEQ ID NO: 10323 - RNA, 22 nt, Artificial Sequence
  Synthesized RNAi sequence
agauagagaaaaggggcuucaa

SEQ ID NO: 10324 - RNA, 22 nt, Artificial Sequence
  Synthesized RNAi sequence
agaugaagaagguaacauguuc

SEQ ID NO: 10325 - RNA, 22 nt, Artificial Sequence
  Synthesized RNAi sequence
agcaaaaggugugaguaaacug

SEQ ID NO: 10326 - RNA, 22 nt, Artificial Sequence
  Synthesized RNAi sequence
agcaaagaaaauaguuggcauc

SEQ ID NO: 10327 - RNA, 22 nt, Artificial Sequence
  Synthesized RNAi sequence
agcaaagccaaagccucauuau

SEQ ID NO: 10328 - RNA, 22 nt, Artificial Sequence
  Synthesized RNAi sequence
agcaacgagcaaaaggugugag

SEQ ID NO: 10329 - RNA, 22 nt, Artificial Sequence
  Synthesized RNAi sequence
agcaaguugcaaacaaagugaa

SEQ ID NO: 10330 - RNA, 22 nt, Artificial Sequence
  Synthesized RNAi sequence
agcauaaagauagagaaaaggg

SEQ ID NO: 10331 - RNA, 22 nt, Artificial Sequence
  Synthesized RNAi sequence
agcauccuugauuucaccuugc

SEQ ID NO: 10332 - RNA, 22 nt, Artificial Sequence
  Synthesized RNAi sequence
agccaaagccucauuauuauuc

SEQ ID NO: 10333 - RNA, 22 nt, Artificial Sequence
  Synthesized RNAi sequence
agccauccgaaagggagugagg

SEQ ID NO: 10334 - RNA, 22 nt, Artificial Sequence
  Synthesized RNAi sequence
agccucauuauuauucuuacaa

SEQ ID NO: 10335 - RNA, 22 nt, Artificial Sequence
  Synthesized RNAi sequence
agcgcgaacaaaaucugaagga

SEQ ID NO: 10336 - RNA, 22 nt, Artificial Sequence
  Synthesized RNAi sequence
agcugguaauagucugaaguga

SEQ ID NO: 10337 - RNA, 22 nt, Artificial Sequence
  Synthesized RNAi sequence
agcuugugcuuacaaaggcacg

SEQ ID NO: 10338 - RNA, 22 nt, Artificial Sequence
  Synthesized RNAi sequence
aggacuuguugugccaucaccu

SEQ ID NO: 10339 - RNA, 22 nt, Artificial Sequence
  Synthesized RNAi sequence
aggaguagcauccuugauuuca

SEQ ID NO: 10340 - RNA, 22 nt, Artificial Sequence
  Synthesized RNAi sequence
aggcacgcuaguagucgucguc

SEQ ID NO: 10341 - RNA, 22 nt, Artificial Sequence
  Synthesized RNAi sequence
aggccagcagcaacgagcaaaa

SEQ ID NO: 10342 - RNA, 22 nt, Artificial Sequence
  Synthesized RNAi sequence
aggcucaucaacaauuuuauug

SEQ ID NO: 10343 - RNA, 22 nt, Artificial Sequence
  Synthesized RNAi sequence
aggcuuguaucgguaucguugc

SEQ ID NO: 10344 - RNA, 22 nt, Artificial Sequence
  Synthesized RNAi sequence
agguaacauguucaacaccagu

SEQ ID NO: 10345 - RNA, 22 nt, Artificial Sequence
  Synthesized RNAi sequence
agguauacaauagucguaacaa

SEQ ID NO: 10346 - RNA, 22 nt, Artificial Sequence
  Synthesized RNAi sequence
aggugugaguaaacuguuacaa

SEQ ID NO: 10347 - RNA, 22 nt, Artificial Sequence
  Synthesized RNAi sequence
aguaacuguguaauacaacaca

SEQ ID NO: 10348 - RNA, 22 nt, Artificial Sequence
  Synthesized RNAi sequence
aguacauaaguucguacucauc

SEQ ID NO: 10349 - RNA, 22 nt, Artificial Sequence
  Synthesized RNAi sequence
aguagacuaaagcauaaagaua

SEQ ID NO: 10350 - RNA, 22 nt, Artificial Sequence
  Synthesized RNAi sequence
aguagcauccuugauuucaccu

SEQ ID NO: 10351 - RNA, 22 nt, Artificial Sequence
  Synthesized RNAi sequence
aguagcgcgaacaaaaucugaa

SEQ ID NO: 10352 - RNA, 22 nt, Artificial Sequence
  Synthesized RNAi sequence
aguagucgucgucgguucauca

SEQ ID NO: 10353 - RNA, 22 nt, Artificial Sequence
  Synthesized RNAi sequence
aguaugccagcaaagaaaauag

SEQ ID NO: 10354 - RNA, 22 nt, Artificial Sequence
  Synthesized RNAi sequence
agucauguucagaaauaggacu

SEQ ID NO: 10355 - RNA, 22 nt, Artificial Sequence
  Synthesized RNAi sequence
agucguaacaauuaguaugcca

SEQ ID NO: 10356 - RNA, 22 nt, Artificial Sequence
  Synthesized RNAi sequence
agucgucgucgguucaucauaa

SEQ ID NO: 10357 - RNA, 22 nt, Artificial Sequence
  Synthesized RNAi sequence
agucugaagugaaguaacugug

SEQ ID NO: 10358 - RNA, 22 nt, Artificial Sequence
  Synthesized RNAi sequence
agugaacacccuuggagagugc

SEQ ID NO: 10359 - RNA, 22 nt, Artificial Sequence
  Synthesized RNAi sequence
agugaaguaacuguguaauaca

SEQ ID NO: 10360 - RNA, 22 nt, Artificial Sequence
  Synthesized RNAi sequence
agugaggcuuguaucgguaucg

SEQ ID NO: 10361 - RNA, 22 nt, Artificial Sequence
  Synthesized RNAi sequence
aguucguacucaucagcuugug

SEQ ID NO: 10362 - RNA, 22 nt, Artificial Sequence
  Synthesized RNAi sequence
aguugcaaacaaagugaacacc

SEQ ID NO: 10363 - RNA, 22 nt, Artificial Sequence
  Synthesized RNAi sequence
aguuuauacucugcaagaagua

SEQ ID NO: 10364 - RNA, 22 nt, Artificial Sequence
  Synthesized RNAi sequence
auaaauugguuccauuacugga

SEQ ID NO: 10365 - RNA, 22 nt, Artificial Sequence
  Synthesized RNAi sequence
auaagccauccgaaagggagug

SEQ ID NO: 10366 - RNA, 22 nt, Artificial Sequence
  Synthesized RNAi sequence
auaaguucguacucaucagcuu

SEQ ID NO: 10367 - RNA, 22 nt, Artificial Sequence
  Synthesized RNAi sequence
auacaauagucguaacaauuag

SEQ ID NO: 10368 - RNA, 22 nt, Artificial Sequence
  Synthesized RNAi sequence
auacucugcaagaaguagacua

SEQ ID NO: 10369 - RNA, 22 nt, Artificial Sequence
  Synthesized RNAi sequence
auagagaaaaggggcuucaagg

SEQ ID NO: 10370 - RNA, 22 nt, Artificial Sequence
  Synthesized RNAi sequence
auaggacuuguugugccaucac

SEQ ID NO: 10371 - RNA, 22 nt, Artificial Sequence
  Synthesized RNAi sequence
auagucguaacaauuaguaugc

SEQ ID NO: 10372 - RNA, 22 nt, Artificial Sequence
  Synthesized RNAi sequence
auagucugaagugaaguaacug

SEQ ID NO: 10373 - RNA, 22 nt, Artificial Sequence
  Synthesized RNAi sequence
aucaacaauuuuauuguagaug

SEQ ID NO: 10374 - RNA, 22 nt, Artificial Sequence
  Synthesized RNAi sequence
aucagcuugugcuuacaaaggc

SEQ ID NO: 10375 - RNA, 22 nt, Artificial Sequence
  Synthesized RNAi sequence
aucauaaauugguuccauuacu

SEQ ID NO: 10376 - RNA, 22 nt, Artificial Sequence
  Synthesized RNAi sequence
auccgaaagggagugaggcuug

SEQ ID NO: 10377 - RNA, 22 nt, Artificial Sequence
  Synthesized RNAi sequence
auccuugauuucaccuugcuuc

SEQ ID NO: 10378 - RNA, 22 nt, Artificial Sequence
  Synthesized RNAi sequence
aucgguaucguugcaguagcgc

SEQ ID NO: 10379 - RNA, 22 nt, Artificial Sequence
  Synthesized RNAi sequence
aucguugcaguagcgcgaacaa

SEQ ID NO: 10380 - RNA, 22 nt, Artificial Sequence
  Synthesized RNAi sequence
aucugaaggaguagcauccuug

SEQ ID NO: 10381 - RNA, 22 nt, Artificial Sequence
  Synthesized RNAi sequence
aucugguagucauguucagaaa

SEQ ID NO: 10382 - RNA, 22 nt, Artificial Sequence
  Synthesized RNAi sequence
augaaccgucgauugugugaau

SEQ ID NO: 10383 - RNA, 22 nt, Artificial Sequence
  Synthesized RNAi sequence
augaagaagguaacauguucaa

SEQ ID NO: 10384 - RNA, 22 nt, Artificial Sequence
  Synthesized RNAi sequence
augaguacauaaguucguacuc

SEQ ID NO: 10385 - RNA, 22 nt, Artificial Sequence
  Synthesized RNAi sequence
augccagcaaagaaaauaguug

SEQ ID NO: 10386 - RNA, 22 nt, Artificial Sequence
  Synthesized RNAi sequence
auguucagaaauaggacuuguu

SEQ ID NO: 10387 - RNA, 22 nt, Artificial Sequence
  Synthesized RNAi sequence
auguucuucaggcucaucaaca

SEQ ID NO: 10388 - RNA, 22 nt, Artificial Sequence
  Synthesized RNAi sequence
auuaacaacuccggaugaaccg

SEQ ID NO: 10389 - RNA, 22 nt, Artificial Sequence
  Synthesized RNAi sequence
auuacuggauuaacaacuccgg

SEQ ID NO: 10390 - RNA, 22 nt, Artificial Sequence
  Synthesized RNAi sequence
auuaguaugccagcaaagaaaa

SEQ ID NO: 10391 - RNA, 22 nt, Artificial Sequence
  Synthesized RNAi sequence
auucuuacaaaguuuauacucu

SEQ ID NO: 10392 - RNA, 22 nt, Artificial Sequence
  Synthesized RNAi sequence
auugguuccauuacuggauuaa

SEQ ID NO: 10393 - RNA, 22 nt, Artificial Sequence
  Synthesized RNAi sequence
auuguaagguauacaauagucg

SEQ ID NO: 10394 - RNA, 22 nt, Artificial Sequence
  Synthesized RNAi sequence
auuguagaugaagaagguaaca

SEQ ID NO: 10395 - RNA, 22 nt, Artificial Sequence
  Synthesized RNAi sequence
auugugugaauuuggacauguu

SEQ ID NO: 10396 - RNA, 22 nt, Artificial Sequence
  Synthesized RNAi sequence
auuuggacauguucuucaggcu

SEQ ID NO: 10397 - RNA, 22 nt, Artificial Sequence
  Synthesized RNAi sequence
auuuuauuguagaugaagaagg

SEQ ID NO: 10398 - RNA, 22 nt, Artificial Sequence
  Synthesized RNAi sequence
uaaacuguuacaaacaacaaca

SEQ ID NO: 10399 - RNA, 22 nt, Artificial Sequence
  Synthesized RNAi sequence
uaaagcauaaagauagagaaaa

SEQ ID NO: 10400 - RNA, 22 nt, Artificial Sequence
  Synthesized RNAi sequence
uaaauugguuccauuacuggau

SEQ ID NO: 10401 - RNA, 22 nt, Artificial Sequence
  Synthesized RNAi sequence
uaacaacuccggaugaaccguc

SEQ ID NO: 10402 - RNA, 22 nt, Artificial Sequence
  Synthesized RNAi sequence
uaacaauuaguaugccagcaaa

SEQ ID NO: 10403 - RNA, 22 nt, Artificial Sequence
  Synthesized RNAi sequence
uaacuguguaauacaacacagu

SEQ ID NO: 10404 - RNA, 22 nt, Artificial Sequence
  Synthesized RNAi sequence
uaagccauccgaaagggaguga

SEQ ID NO: 10405 - RNA, 22 nt, Artificial Sequence
  Synthesized RNAi sequence
uaagguauacaauagucguaac

SEQ ID NO: 10406 - RNA, 22 nt, Artificial Sequence
  Synthesized RNAi sequence
uaaguucguacucaucagcuug

SEQ ID NO: 10407 - RNA, 22 nt, Artificial Sequence
  Synthesized RNAi sequence
uaauacaacacagucuuuuacu

SEQ ID NO: 10408 - RNA, 22 nt, Artificial Sequence
  Synthesized RNAi sequence
uaauagucugaagugaaguaac

SEQ ID NO: 10409 - RNA, 22 nt, Artificial Sequence
  Synthesized RNAi sequence
uacaaacaacaacagcaaguug

SEQ ID NO: 10410 - RNA, 22 nt, Artificial Sequence
  Synthesized RNAi sequence
uacaaaggcacgcuaguagucg

SEQ ID NO: 10411 - RNA, 22 nt, Artificial Sequence
  Synthesized RNAi sequence
uacaaaguuuauacucugcaag

SEQ ID NO: 10412 - RNA, 22 nt, Artificial Sequence
  Synthesized RNAi sequence
uacaauagucguaacaauuagu

SEQ ID NO: 10413 - RNA, 22 nt, Artificial Sequence
  Synthesized RNAi sequence
uacauaaguucguacucaucag

SEQ ID NO: 10414 - RNA, 22 nt, Artificial Sequence
  Synthesized RNAi sequence
uacucaucagcuugugcuuaca

SEQ ID NO: 10415 - RNA, 22 nt, Artificial Sequence
  Synthesized RNAi sequence
uacucugcaagaaguagacuaa

SEQ ID NO: 10416 - RNA, 22 nt, Artificial Sequence
  Synthesized RNAi sequence
uacuggauuaacaacuccggau

SEQ ID NO: 10417 - RNA, 22 nt, Artificial Sequence
  Synthesized RNAi sequence
uagacuaaagcauaaagauaga

SEQ ID NO: 10418 - RNA, 22 nt, Artificial Sequence
  Synthesized RNAi sequence
uagagaaaaggggcuucaaggc

SEQ ID NO: 10419 - RNA, 22 nt, Artificial Sequence
  Synthesized RNAi sequence
uagaugaagaagguaacauguu

SEQ ID NO: 10420 - RNA, 22 nt, Artificial Sequence
  Synthesized RNAi sequence
uagcauccuugauuucaccuug

SEQ ID NO: 10421 - RNA, 22 nt, Artificial Sequence
  Synthesized RNAi sequence
uagcgcgaacaaaaucugaagg

SEQ ID NO: 10422 - RNA, 22 nt, Artificial Sequence
  Synthesized RNAi sequence
uaggacuuguugugccaucacc

SEQ ID NO: 10423 - RNA, 22 nt, Artificial Sequence
  Synthesized RNAi sequence
uaguagucgucgucgguucauc

SEQ ID NO: 10424 - RNA, 22 nt, Artificial Sequence
  Synthesized RNAi sequence
uaguaugccagcaaagaaaaua

SEQ ID NO: 10425 - RNA, 22 nt, Artificial Sequence
  Synthesized RNAi sequence
uagucauguucagaaauaggac

SEQ ID NO: 10426 - RNA, 22 nt, Artificial Sequence
  Synthesized RNAi sequence
uagucguaacaauuaguaugcc

SEQ ID NO: 10427 - RNA, 22 nt, Artificial Sequence
  Synthesized RNAi sequence
uagucgucgucgguucaucaua

SEQ ID NO: 10428 - RNA, 22 nt, Artificial Sequence
  Synthesized RNAi sequence
uagucugaagugaaguaacugu

SEQ ID NO: 10429 - RNA, 22 nt, Artificial Sequence
  Synthesized RNAi sequence
uauacucugcaagaaguagacu

SEQ ID NO: 10430 - RNA, 22 nt, Artificial Sequence
  Synthesized RNAi sequence
uaucguugcaguagcgcgaaca

SEQ ID NO: 10431 - RNA, 22 nt, Artificial Sequence
  Synthesized RNAi sequence
uaugccagcaaagaaaauaguu

SEQ ID NO: 10432 - RNA, 22 nt, Artificial Sequence
  Synthesized RNAi sequence
uauucuuacaaaguuuauacuc

SEQ ID NO: 10433 - RNA, 22 nt, Artificial Sequence
  Synthesized RNAi sequence
uauuguagaugaagaagguaac

SEQ ID NO: 10434 - RNA, 22 nt, Artificial Sequence
  Synthesized RNAi sequence
ucaacaauuuuauuguagauga

SEQ ID NO: 10435 - RNA, 22 nt, Artificial Sequence
  Synthesized RNAi sequence
ucaaggccagcagcaacgagca

SEQ ID NO: 10436 - RNA, 22 nt, Artificial Sequence
  Synthesized RNAi sequence
ucagaaauaggacuuguugugc

SEQ ID NO: 10437 - RNA, 22 nt, Artificial Sequence
  Synthesized RNAi sequence
ucagcuugugcuuacaaaggca

SEQ ID NO: 10438 - RNA, 22 nt, Artificial Sequence
  Synthesized RNAi sequence
ucaggcucaucaacaauuuuau

SEQ ID NO: 10439 - RNA, 22 nt, Artificial Sequence
  Synthesized RNAi sequence
ucauaaauugguuccauuacug

SEQ ID NO: 10440 - RNA, 22 nt, Artificial Sequence
  Synthesized RNAi sequence
ucaucaacaauuuuauuguaga

SEQ ID NO: 10441 - RNA, 22 nt, Artificial Sequence
  Synthesized RNAi sequence
ucaucagcuugugcuuacaaag

SEQ ID NO: 10442 - RNA, 22 nt, Artificial Sequence
  Synthesized RNAi sequence
ucaucauaaauugguuccauua

SEQ ID NO: 10443 - RNA, 22 nt, Artificial Sequence
  Synthesized RNAi sequence
ucauguucagaaauaggacuug

SEQ ID NO: 10444 - RNA, 22 nt, Artificial Sequence
  Synthesized RNAi sequence
uccagcaaagccaaagccucau

SEQ ID NO: 10445 - RNA, 22 nt, Artificial Sequence
  Synthesized RNAi sequence
uccauuacuggauuaacaacuc

SEQ ID NO: 10446 - RNA, 22 nt, Artificial Sequence
  Synthesized RNAi sequence
uccgaaagggagugaggcuugu

SEQ ID NO: 10447 - RNA, 22 nt, Artificial Sequence
  Synthesized RNAi sequence
uccggaugaaccgucgauugug

SEQ ID NO: 10448 - RNA, 22 nt, Artificial Sequence
  Synthesized RNAi sequence
uccuugauuucaccuugcuuca

SEQ ID NO: 10449 - RNA, 22 nt, Artificial Sequence
  Synthesized RNAi sequence
ucgauugugugaauuuggacau

SEQ ID NO: 10450 - RNA, 22 nt, Artificial Sequence
  Synthesized RNAi sequence
ucgguaucguugcaguagcgcg

SEQ ID NO: 10451 - RNA, 22 nt, Artificial Sequence
  Synthesized RNAi sequence
ucgguucaucauaaauugguuc

SEQ ID NO: 10452 - RNA, 22 nt, Artificial Sequence
  Synthesized RNAi sequence
ucguaacaauuaguaugccagc

SEQ ID NO: 10453 - RNA, 22 nt, Artificial Sequence
  Synthesized RNAi sequence
ucguacucaucagcuugugcuu

SEQ ID NO: 10454 - RNA, 22 nt, Artificial Sequence
  Synthesized RNAi sequence
ucgucgguucaucauaaauugg

SEQ ID NO: 10455 - RNA, 22 nt, Artificial Sequence
  Synthesized RNAi sequence
ucgucgucgguucaucauaaau

SEQ ID NO: 10456 - RNA, 22 nt, Artificial Sequence
  Synthesized RNAi sequence
ucguugcaguagcgcgaacaaa

SEQ ID NO: 10457 - RNA, 22 nt, Artificial Sequence
  Synthesized RNAi sequence
ucugaaggaguagcauccuuga

SEQ ID NO: 10458 - RNA, 22 nt, Artificial Sequence
  Synthesized RNAi sequence
ucugaagugaaguaacugugua

SEQ ID NO: 10459 - RNA, 22 nt, Artificial Sequence
  Synthesized RNAi sequence
ucugcaagaaguagacuaaagc

SEQ ID NO: 10460 - RNA, 22 nt, Artificial Sequence
  Synthesized RNAi sequence
ucugguagucauguucagaaau

SEQ ID NO: 10461 - RNA, 22 nt, Artificial Sequence
  Synthesized RNAi sequence
ucuuacaaaguuuauacucugc

SEQ ID NO: 10462 - RNA, 22 nt, Artificial Sequence
  Synthesized RNAi sequence
ugaacacccuuggagagugcua

SEQ ID NO: 10463 - RNA, 22 nt, Artificial Sequence
  Synthesized RNAi sequence
ugaaccgucgauugugugaauu

SEQ ID NO: 10464 - RNA, 22 nt, Artificial Sequence
  Synthesized RNAi sequence
ugaagaagguaacauguucaac

SEQ ID NO: 10465 - RNA, 22 nt, Artificial Sequence
  Synthesized RNAi sequence
ugaaggaguagcauccuugauu

SEQ ID NO: 10466 - RNA, 22 nt, Artificial Sequence
  Synthesized RNAi sequence
ugaaguaacuguguaauacaac

SEQ ID NO: 10467 - RNA, 22 nt, Artificial Sequence
  Synthesized RNAi sequence
ugaagugaaguaacuguguaau

SEQ ID NO: 10468 - RNA, 22 nt, Artificial Sequence
  Synthesized RNAi sequence
ugaggcuuguaucgguaucguu

SEQ ID NO: 10469 - RNA, 22 nt, Artificial Sequence
  Synthesized RNAi sequence
ugaguaaacuguuacaaacaac

SEQ ID NO: 10470 - RNA, 22 nt, Artificial Sequence
  Synthesized RNAi sequence
ugaguacauaaguucguacuca

SEQ ID NO: 10471 - RNA, 22 nt, Artificial Sequence
  Synthesized RNAi sequence
ugcaaacaaagugaacacccuu

SEQ ID NO: 10472 - RNA, 22 nt, Artificial Sequence
  Synthesized RNAi sequence
ugcaacgccaacaauaagccau

SEQ ID NO: 10473 - RNA, 22 nt, Artificial Sequence
  Synthesized RNAi sequence
ugcaguagcgcgaacaaaaucu

SEQ ID NO: 10474 - RNA, 22 nt, Artificial Sequence
  Synthesized RNAi sequence
ugccagcaaagaaaauaguugg

SEQ ID NO: 10475 - RNA, 22 nt, Artificial Sequence
  Synthesized RNAi sequence
ugcuuacaaaggcacgcuagua

SEQ ID NO: 10476 - RNA, 22 nt, Artificial Sequence
  Synthesized RNAi sequence
uggacauguucuucaggcucau

SEQ ID NO: 10477 - RNA, 22 nt, Artificial Sequence
  Synthesized RNAi sequence
uggauuaacaacuccggaugaa

SEQ ID NO: 10478 - RNA, 22 nt, Artificial Sequence
  Synthesized RNAi sequence
ugguaauagucugaagugaagu

SEQ ID NO: 10479 - RNA, 22 nt, Artificial Sequence
  Synthesized RNAi sequence
ugguagucauguucagaaauag

SEQ ID NO: 10480 - RNA, 22 nt, Artificial Sequence
  Synthesized RNAi sequence
ugguuccauuacuggauuaaca

SEQ ID NO: 10481 - RNA, 22 nt, Artificial Sequence
  Synthesized RNAi sequence
uguaagguauacaauagucgua

SEQ ID NO: 10482 - RNA, 22 nt, Artificial Sequence
  Synthesized RNAi sequence
uguaauacaacacagucuuuua

SEQ ID NO: 10483 - RNA, 22 nt, Artificial Sequence
  Synthesized RNAi sequence
uguagaugaagaagguaacaug

SEQ ID NO: 10484 - RNA, 22 nt, Artificial Sequence
  Synthesized RNAi sequence
uguaucgguaucguugcaguag

SEQ ID NO: 10485 - RNA, 22 nt, Artificial Sequence
  Synthesized RNAi sequence
ugugaauuuggacauguucuuc

SEQ ID NO: 10486 - RNA, 22 nt, Artificial Sequence
  Synthesized RNAi sequence
ugugaguaaacuguuacaaaca

SEQ ID NO: 10487 - RNA, 22 nt, Artificial Sequence
  Synthesized RNAi sequence
ugugcuuacaaaggcacgcuag

SEQ ID NO: 10488 - RNA, 22 nt, Artificial Sequence
  Synthesized RNAi sequence
uguguaauacaacacagucuuu

SEQ ID NO: 10489 - RNA, 22 nt, Artificial Sequence
  Synthesized RNAi sequence
ugugugaauuuggacauguucu

SEQ ID NO: 10490 - RNA, 22 nt, Artificial Sequence
  Synthesized RNAi sequence
uguuacaaacaacaacagcaag

SEQ ID NO: 10491 - RNA, 22 nt, Artificial Sequence
  Synthesized RNAi sequence
uguucagaaauaggacuuguug

SEQ ID NO: 10492 - RNA, 22 nt, Artificial Sequence
  Synthesized RNAi sequence
uguucuucaggcucaucaacaa

SEQ ID NO: 10493 - RNA, 22 nt, Artificial Sequence
  Synthesized RNAi sequence
uuaacaacuccggaugaaccgu

SEQ ID NO: 10494 - RNA, 22 nt, Artificial Sequence
  Synthesized RNAi sequence
uuacaaacaacaacagcaaguu

SEQ ID NO: 10495 - RNA, 22 nt, Artificial Sequence
  Synthesized RNAi sequence
uuacaaaggcacgcuaguaguc

SEQ ID NO: 10496 - RNA, 22 nt, Artificial Sequence
  Synthesized RNAi sequence
uuacaaaguuuauacucugcaa

SEQ ID NO: 10497 - RNA, 22 nt, Artificial Sequence
  Synthesized RNAi sequence
uuacuggauuaacaacuccgga

SEQ ID NO: 10498 - RNA, 22 nt, Artificial Sequence
  Synthesized RNAi sequence
uuaguaugccagcaaagaaaau

SEQ ID NO: 10499 - RNA, 22 nt, Artificial Sequence
  Synthesized RNAi sequence
uuauacucugcaagaaguagac

SEQ ID NO: 10500 - RNA, 22 nt, Artificial Sequence
  Synthesized RNAi sequence
uuauucuuacaaaguuuauacu

SEQ ID NO: 10501 - RNA, 22 nt, Artificial Sequence
  Synthesized RNAi sequence
uuauuguagaugaagaagguaa

SEQ ID NO: 10502 - RNA, 22 nt, Artificial Sequence
  Synthesized RNAi sequence
uucaaggccagcagcaacgagc

SEQ ID NO: 10503 - RNA, 22 nt, Artificial Sequence
  Synthesized RNAi sequence
uucagaaauaggacuuguugug

SEQ ID NO: 10504 - RNA, 22 nt, Artificial Sequence
  Synthesized RNAi sequence
uucaggcucaucaacaauuuua

SEQ ID NO: 10505 - RNA, 22 nt, Artificial Sequence
  Synthesized RNAi sequence
uucaucauaaauugguuccauu

SEQ ID NO: 10506 - RNA, 22 nt, Artificial Sequence
  Synthesized RNAi sequence
uuccagcaaagccaaagccuca

SEQ ID NO: 10507 - RNA, 22 nt, Artificial Sequence
  Synthesized RNAi sequence
uuccauuacuggauuaacaacu

SEQ ID NO: 10508 - RNA, 22 nt, Artificial Sequence
  Synthesized RNAi sequence
uucguacucaucagcuugugcu

SEQ ID NO: 10509 - RNA, 22 nt, Artificial Sequence
  Synthesized RNAi sequence
uucuuacaaaguuuauacucug

SEQ ID NO: 10510 - RNA, 22 nt, Artificial Sequence
  Synthesized RNAi sequence
uucuucaggcucaucaacaauu

SEQ ID NO: 10511 - RNA, 22 nt, Artificial Sequence
  Synthesized RNAi sequence
uugauuucaccuugcuucaaag

SEQ ID NO: 10512 - RNA, 22 nt, Artificial Sequence
  Synthesized RNAi sequence
uugcaaacaaagugaacacccu

SEQ ID NO: 10513 - RNA, 22 nt, Artificial Sequence
  Synthesized RNAi sequence
uugcaguagcgcgaacaaaauc

SEQ ID NO: 10514 - RNA, 22 nt, Artificial Sequence
  Synthesized RNAi sequence
uuggacauguucuucaggcuca

SEQ ID NO: 10515 - RNA, 22 nt, Artificial Sequence
  Synthesized RNAi sequence
uugguuccauuacuggauuaac

SEQ ID NO: 10516 - RNA, 22 nt, Artificial Sequence
  Synthesized RNAi sequence
uuguaagguauacaauagucgu

SEQ ID NO: 10517 - RNA, 22 nt, Artificial Sequence
  Synthesized RNAi sequence
uuguagaugaagaagguaacau

SEQ ID NO: 10518 - RNA, 22 nt, Artificial Sequence
  Synthesized RNAi sequence
uuguaucgguaucguugcagua

SEQ ID NO: 10519 - RNA, 22 nt, Artificial Sequence
  Synthesized RNAi sequence
uugugcuuacaaaggcacgcua

SEQ ID NO: 10520 - RNA, 22 nt, Artificial Sequence
  Synthesized RNAi sequence
uuuauacucugcaagaaguaga

SEQ ID NO: 10521 - RNA, 22 nt, Artificial Sequence
  Synthesized RNAi sequence
uuuauuguagaugaagaaggua

SEQ ID NO: 10522 - RNA, 22 nt, Artificial Sequence
  Synthesized RNAi sequence
uuuggacauguucuucaggcuc

SEQ ID NO: 10523 - RNA, 22 nt, Artificial Sequence
  Synthesized RNAi sequence
uuuuauuguagaugaagaaggu

SEQ ID NO: 10524 - RNA, 22 nt, Artificial Sequence
  Synthesized RNAi sequence
aaacuuuaaaaguccucauaau

SEQ ID NO: 10525 - RNA, 22 nt, Artificial Sequence
  Synthesized RNAi sequence
aaagaauaauuuucauguucgu

SEQ ID NO: 10526 - RNA, 22 nt, Artificial Sequence
  Synthesized RNAi sequence
aaauggaaacuuuaaaaguccu

SEQ ID NO: 10527 - RNA, 22 nt, Artificial Sequence
  Synthesized RNAi sequence
aagaaaagaauaauuuucaugu

SEQ ID NO: 10528 - RNA, 22 nt, Artificial Sequence
  Synthesized RNAi sequence
aagaauaauuuucauguucguu

SEQ ID NO: 10529 - RNA, 22 nt, Artificial Sequence
  Synthesized RNAi sequence
aagauuccaaauggaaacuuua

SEQ ID NO: 10530 - RNA, 22 nt, Artificial Sequence
  Synthesized RNAi sequence
aaguccucauaauaauuaguaa

SEQ ID NO: 10531 - RNA, 22 nt, Artificial Sequence
  Synthesized RNAi sequence
aauaauuaguaauaucucugcu

SEQ ID NO: 10532 - RNA, 22 nt, Artificial Sequence
  Synthesized RNAi sequence
aauaauuuucauguucguuuaa

SEQ ID NO: 10533 - RNA, 22 nt, Artificial Sequence
  Synthesized RNAi sequence
aauaucucugcuauaguaaccu

SEQ ID NO: 10534 - RNA, 22 nt, Artificial Sequence
  Synthesized RNAi sequence
aauauuuauucucaguuaguga

SEQ ID NO: 10535 - RNA, 22 nt, Artificial Sequence
  Synthesized RNAi sequence
aaucaaucuccauugguugcuc

SEQ ID NO: 10536 - RNA, 22 nt, Artificial Sequence
  Synthesized RNAi sequence
aaucuccauugguugcucuuca

SEQ ID NO: 10537 - RNA, 22 nt, Artificial Sequence
  Synthesized RNAi sequence
aauggaaacuuuaaaaguccuc

SEQ ID NO: 10538 - RNA, 22 nt, Artificial Sequence
  Synthesized RNAi sequence
aauuaguaauaucucugcuaua

SEQ ID NO: 10539 - RNA, 22 nt, Artificial Sequence
  Synthesized RNAi sequence
aauugagaauauuuauucucag

SEQ ID NO: 10540 - RNA, 22 nt, Artificial Sequence
  Synthesized RNAi sequence
aauuuucauguucguuuaauca

SEQ ID NO: 10541 - RNA, 22 nt, Artificial Sequence
  Synthesized RNAi sequence
acuuuaaaaguccucauaauaa

SEQ ID NO: 10542 - RNA, 22 nt, Artificial Sequence
  Synthesized RNAi sequence
agaaaagaauaauuuucauguu

SEQ ID NO: 10543 - RNA, 22 nt, Artificial Sequence
  Synthesized RNAi sequence
agaauaauuuucauguucguuu

SEQ ID NO: 10544 - RNA, 22 nt, Artificial Sequence
  Synthesized RNAi sequence
agauuccaaauggaaacuuuaa

SEQ ID NO: 10545 - RNA, 22 nt, Artificial Sequence
  Synthesized RNAi sequence
aguaauaucucugcuauaguaa

SEQ ID NO: 10546 - RNA, 22 nt, Artificial Sequence
  Synthesized RNAi sequence
aguccucauaauaauuaguaau

SEQ ID NO: 10547 - RNA, 22 nt, Artificial Sequence
  Synthesized RNAi sequence
agugccaagaaaagaauaauuu

SEQ ID NO: 10548 - RNA, 22 nt, Artificial Sequence
  Synthesized RNAi sequence
auaauaauuaguaauaucucug

SEQ ID NO: 10549 - RNA, 22 nt, Artificial Sequence
  Synthesized RNAi sequence
auaauuaguaauaucucugcua

SEQ ID NO: 10550 - RNA, 22 nt, Artificial Sequence
  Synthesized RNAi sequence
auaauuuucauguucguuuaau

SEQ ID NO: 10551 - RNA, 22 nt, Artificial Sequence
  Synthesized RNAi sequence
auaucucugcuauaguaaccug

SEQ ID NO: 10552 - RNA, 22 nt, Artificial Sequence
  Synthesized RNAi sequence
aucaagauuccaaauggaaacu

SEQ ID NO: 10553 - RNA, 22 nt, Artificial Sequence
  Synthesized RNAi sequence
aucaaucuccauugguugcucu

SEQ ID NO: 10554 - RNA, 22 nt, Artificial Sequence
  Synthesized RNAi sequence
aucuccauugguugcucuucau

SEQ ID NO: 10555 - RNA, 22 nt, Artificial Sequence
  Synthesized RNAi sequence
aucucugcuauaguaaccugaa

SEQ ID NO: 10556 - RNA, 22 nt, Artificial Sequence
  Synthesized RNAi sequence
auggaaacuuuaaaaguccuca

SEQ ID NO: 10557 - RNA, 22 nt, Artificial Sequence
  Synthesized RNAi sequence
auguucguuuaaucaaucucca

SEQ ID NO: 10558 - RNA, 22 nt, Artificial Sequence
  Synthesized RNAi sequence
auuaguaauaucucugcuauag

SEQ ID NO: 10559 - RNA, 22 nt, Artificial Sequence
  Synthesized RNAi sequence
auuccaaauggaaacuuuaaaa

SEQ ID NO: 10560 - RNA, 22 nt, Artificial Sequence
  Synthesized RNAi sequence
auugagaauauuuauucucagu

SEQ ID NO: 10561 - RNA, 22 nt, Artificial Sequence
  Synthesized RNAi sequence
auugguugcucuucaucuaauu

SEQ ID NO: 10562 - RNA, 22 nt, Artificial Sequence
  Synthesized RNAi sequence
auuuucauguucguuuaaucaa

SEQ ID NO: 10563 - RNA, 22 nt, Artificial Sequence
  Synthesized RNAi sequence
uaaaaguccucauaauaauuag

SEQ ID NO: 10564 - RNA, 22 nt, Artificial Sequence
  Synthesized RNAi sequence
uaauaauuaguaauaucucugc

SEQ ID NO: 10565 - RNA, 22 nt, Artificial Sequence
  Synthesized RNAi sequence
uaaucaagauuccaaauggaaa

SEQ ID NO: 10566 - RNA, 22 nt, Artificial Sequence
  Synthesized RNAi sequence
uaaucaaucuccauugguugcu

SEQ ID NO: 10567 - RNA, 22 nt, Artificial Sequence
  Synthesized RNAi sequence
uaauuaguaauaucucugcuau

SEQ ID NO: 10568 - RNA, 22 nt, Artificial Sequence
  Synthesized RNAi sequence
uaauugagaauauuuauucuca

SEQ ID NO: 10569 - RNA, 22 nt, Artificial Sequence
  Synthesized RNAi sequence
uaauuuucauguucguuuaauc

SEQ ID NO: 10570 - RNA, 22 nt, Artificial Sequence
  Synthesized RNAi sequence
uaguaauaucucugcuauagua

SEQ ID NO: 10571 - RNA, 22 nt, Artificial Sequence
  Synthesized RNAi sequence
uaucucugcuauaguaaccuga

SEQ ID NO: 10572 - RNA, 22 nt, Artificial Sequence
  Synthesized RNAi sequence
uaugauguaaucaagauuccaa

SEQ ID NO: 10573 - RNA, 22 nt, Artificial Sequence
  Synthesized RNAi sequence
ucaagauuccaaauggaaacuu

SEQ ID NO: 10574 - RNA, 22 nt, Artificial Sequence
  Synthesized RNAi sequence
ucaaucuccauugguugcucuu

SEQ ID NO: 10575 - RNA, 22 nt, Artificial Sequence
  Synthesized RNAi sequence
ucauaauaauuaguaauaucuc

SEQ ID NO: 10576 - RNA, 22 nt, Artificial Sequence
  Synthesized RNAi sequence
ucaucuaauugagaauauuuau

SEQ ID NO: 10577 - RNA, 22 nt, Artificial Sequence
  Synthesized RNAi sequence
ucauguucguuuaaucaaucuc

SEQ ID NO: 10578 - RNA, 22 nt, Artificial Sequence
  Synthesized RNAi sequence
uccaaauggaaacuuuaaaagu

SEQ ID NO: 10579 - RNA, 22 nt, Artificial Sequence
  Synthesized RNAi sequence
uccucauaauaauuaguaauau

SEQ ID NO: 10580 - RNA, 22 nt, Artificial Sequence
  Synthesized RNAi sequence
ucguuuaaucaaucuccauugg

SEQ ID NO: 10581 - RNA, 22 nt, Artificial Sequence
  Synthesized RNAi sequence
ucuaauugagaauauuuauucu

SEQ ID NO: 10582 - RNA, 22 nt, Artificial Sequence
  Synthesized RNAi sequence
ucuccauugguugcucuucauc

SEQ ID NO: 10583 - RNA, 22 nt, Artificial Sequence
  Synthesized RNAi sequence
ucucugcuauaguaaccugaaa

SEQ ID NO: 10584 - RNA, 22 nt, Artificial Sequence
  Synthesized RNAi sequence
ucugcuauaguaaccugaaagu

SEQ ID NO: 10585 - RNA, 22 nt, Artificial Sequence
  Synthesized RNAi sequence
ucuucaucuaauugagaauauu

SEQ ID NO: 10586 - RNA, 22 nt, Artificial Sequence
  Synthesized RNAi sequence
ugagaauauuuauucucaguua

SEQ ID NO: 10587 - RNA, 22 nt, Artificial Sequence
  Synthesized RNAi sequence
ugauguaaucaagauuccaaau

SEQ ID NO: 10588 - RNA, 22 nt, Artificial Sequence
  Synthesized RNAi sequence
ugcuauaguaaccugaaaguca

SEQ ID NO: 10589 - RNA, 22 nt, Artificial Sequence
  Synthesized RNAi sequence
ugcucuucaucuaauugagaau

SEQ ID NO: 10590 - RNA, 22 nt, Artificial Sequence
  Synthesized RNAi sequence
uggaaacuuuaaaaguccucau

SEQ ID NO: 10591 - RNA, 22 nt, Artificial Sequence
  Synthesized RNAi sequence
ugguugcucuucaucuaauuga

SEQ ID NO: 10592 - RNA, 22 nt, Artificial Sequence
  Synthesized RNAi sequence
uguucguuuaaucaaucuccau

SEQ ID NO: 10593 - RNA, 22 nt, Artificial Sequence
  Synthesized RNAi sequence
uuaaucaaucuccauugguugc

SEQ ID NO: 10594 - RNA, 22 nt, Artificial Sequence
  Synthesized RNAi sequence
uuaguaauaucucugcuauagu

SEQ ID NO: 10595 - RNA, 22 nt, Artificial Sequence
  Synthesized RNAi sequence
uuaugauguaaucaagauucca

SEQ ID NO: 10596 - RNA, 22 nt, Artificial Sequence
  Synthesized RNAi sequence
uucaucuaauugagaauauuua

SEQ ID NO: 10597 - RNA, 22 nt, Artificial Sequence
  Synthesized RNAi sequence
uucauguucguuuaaucaaucu

SEQ ID NO: 10598 - RNA, 22 nt, Artificial Sequence
  Synthesized RNAi sequence
uuccaaauggaaacuuuaaaag

SEQ ID NO: 10599 - RNA, 22 nt, Artificial Sequence
  Synthesized RNAi sequence
uucguuuaaucaaucuccauug

SEQ ID NO: 10600 - RNA, 22 nt, Artificial Sequence
  Synthesized RNAi sequence
uugagaauauuuauucucaguu

SEQ ID NO: 10601 - RNA, 22 nt, Artificial Sequence
  Synthesized RNAi sequence
uugcucuucaucuaauugagaa

SEQ ID NO: 10602 - RNA, 22 nt, Artificial Sequence
  Synthesized RNAi sequence
uugguugcucuucaucuaauug

SEQ ID NO: 10603 - RNA, 22 nt, Artificial Sequence
  Synthesized RNAi sequence
uuuaaaaguccucauaauaauu

SEQ ID NO: 10604 - RNA, 22 nt, Artificial Sequence
  Synthesized RNAi sequence
uuuaaucaaucuccauugguug

SEQ ID NO: 10605 - RNA, 22 nt, Artificial Sequence
  Synthesized RNAi sequence
uuuaugauguaaucaagauucc

SEQ ID NO: 10606 - RNA, 22 nt, Artificial Sequence
  Synthesized RNAi sequence
uuucauguucguuuaaucaauc

SEQ ID NO: 10607 - RNA, 22 nt, Artificial Sequence
  Synthesized RNAi sequence
aaacugaucuggcacguaacug

SEQ ID NO: 10608 - RNA, 22 nt, Artificial Sequence
  Synthesized RNAi sequence
aaagcaaauugagugcuaaagc

SEQ ID NO: 10609 - RNA, 22 nt, Artificial Sequence
  Synthesized RNAi sequence
aaagcaagucagugcaaauuug

SEQ ID NO: 10610 - RNA, 22 nt, Artificial Sequence
  Synthesized RNAi sequence
aaagcucacaaguagcgagugu

SEQ ID NO: 10611 - RNA, 22 nt, Artificial Sequence
  Synthesized RNAi sequence
aaaguacuguuguaccucuaac

SEQ ID NO: 10612 - RNA, 22 nt, Artificial Sequence
  Synthesized RNAi sequence
aaaguguuauaaacacuauugc

SEQ ID NO: 10613 - RNA, 22 nt, Artificial Sequence
  Synthesized RNAi sequence
aaaguucaaucauucugucuuu

SEQ ID NO: 10614 - RNA, 22 nt, Artificial Sequence
  Synthesized RNAi sequence
aaauggugaauugcccucguau

SEQ ID NO: 10615 - RNA, 22 nt, Artificial Sequence
  Synthesized RNAi sequence
aaauugagugcuaaagcaaguc

SEQ ID NO: 10616 - RNA, 22 nt, Artificial Sequence
  Synthesized RNAi sequence
aaauuuguuaucagcuagagga

SEQ ID NO: 10617 - RNA, 22 nt, Artificial Sequence
  Synthesized RNAi sequence
aacacacucuugguagugauaa

SEQ ID NO: 10618 - RNA, 22 nt, Artificial Sequence
  Synthesized RNAi sequence
aacaguuuaggugaaacugauc

SEQ ID NO: 10619 - RNA, 22 nt, Artificial Sequence
  Synthesized RNAi sequence
aacugauagacguguuuuacgc

SEQ ID NO: 10620 - RNA, 22 nt, Artificial Sequence
  Synthesized RNAi sequence
aacugaucuggcacguaacuga

SEQ ID NO: 10621 - RNA, 22 nt, Artificial Sequence
  Synthesized RNAi sequence
aacuuccucuugucugaugaac

SEQ ID NO: 10622 - RNA, 22 nt, Artificial Sequence
  Synthesized RNAi sequence
aagagcaagguucuuuuaaaag

SEQ ID NO: 10623 - RNA, 22 nt, Artificial Sequence
  Synthesized RNAi sequence
aagcaaaagcaaauugagugcu

SEQ ID NO: 10624 - RNA, 22 nt, Artificial Sequence
  Synthesized RNAi sequence
aagcaaaguguuauaaacacua

SEQ ID NO: 10625 - RNA, 22 nt, Artificial Sequence
  Synthesized RNAi sequence
aagcaaauugagugcuaaagca

SEQ ID NO: 10626 - RNA, 22 nt, Artificial Sequence
  Synthesized RNAi sequence
aagcaagucagugcaaauuugu

SEQ ID NO: 10627 - RNA, 22 nt, Artificial Sequence
  Synthesized RNAi sequence
aagcucacaaguagcgaguguu

SEQ ID NO: 10628 - RNA, 22 nt, Artificial Sequence
  Synthesized RNAi sequence
aagguucuuuuaaaaguacugu

SEQ ID NO: 10629 - RNA, 22 nt, Artificial Sequence
  Synthesized RNAi sequence
aaguacuguuguaccucuaaca

SEQ ID NO: 10630 - RNA, 22 nt, Artificial Sequence
  Synthesized RNAi sequence
aaguagcgaguguuaucagugc

SEQ ID NO: 10631 - RNA, 22 nt, Artificial Sequence
  Synthesized RNAi sequence
aagucaauuaaugaaaguucaa

SEQ ID NO: 10632 - RNA, 22 nt, Artificial Sequence
  Synthesized RNAi sequence
aagucagugcaaauuuguuauc

SEQ ID NO: 10633 - RNA, 22 nt, Artificial Sequence
  Synthesized RNAi sequence
aaguguuauaaacacuauugcc

SEQ ID NO: 10634 - RNA, 22 nt, Artificial Sequence
  Synthesized RNAi sequence
aaguucaaucauucugucuuuc

SEQ ID NO: 10635 - RNA, 22 nt, Artificial Sequence
  Synthesized RNAi sequence
aaguucuugaacuuccucuugu

SEQ ID NO: 10636 - RNA, 22 nt, Artificial Sequence
  Synthesized RNAi sequence
aaucauucugucuuucuuuuga

SEQ ID NO: 10637 - RNA, 22 nt, Artificial Sequence
  Synthesized RNAi sequence
aaugaaaguucaaucauucugu

SEQ ID NO: 10638 - RNA, 22 nt, Artificial Sequence
  Synthesized RNAi sequence
aauggugaauugcccucguaug

SEQ ID NO: 10639 - RNA, 22 nt, Artificial Sequence
  Synthesized RNAi sequence
aauuaaugaaaguucaaucauu

SEQ ID NO: 10640 - RNA, 22 nt, Artificial Sequence
  Synthesized RNAi sequence
aauugagugcuaaagcaaguca

SEQ ID NO: 10641 - RNA, 22 nt, Artificial Sequence
  Synthesized RNAi sequence
aauugcccucguauguuccaga

SEQ ID NO: 10642 - RNA, 22 nt, Artificial Sequence
  Synthesized RNAi sequence
aauuuguuaucagcuagaggau

SEQ ID NO: 10643 - RNA, 22 nt, Artificial Sequence
  Synthesized RNAi sequence
acaagcaaaagcaaauugagug

SEQ ID NO: 10644 - RNA, 22 nt, Artificial Sequence
  Synthesized RNAi sequence
acaaguagcgaguguuaucagu

SEQ ID NO: 10645 - RNA, 22 nt, Artificial Sequence
  Synthesized RNAi sequence
acacacucuugguagugauaaa

SEQ ID NO: 10646 - RNA, 22 nt, Artificial Sequence
  Synthesized RNAi sequence
acacucuugguagugauaaagc

SEQ ID NO: 10647 - RNA, 22 nt, Artificial Sequence
  Synthesized RNAi sequence
acaguuuaggugaaacugaucu

SEQ ID NO: 10648 - RNA, 22 nt, Artificial Sequence
  Synthesized RNAi sequence
accucuaacacacucuugguag

SEQ ID NO: 10649 - RNA, 22 nt, Artificial Sequence
  Synthesized RNAi sequence
acgccgucaggacaagcaaaag

SEQ ID NO: 10650 - RNA, 22 nt, Artificial Sequence
  Synthesized RNAi sequence
acguguuuuacgccgucaggac

SEQ ID NO: 10651 - RNA, 22 nt, Artificial Sequence
  Synthesized RNAi sequence
acucuugguagugauaaagcuc

SEQ ID NO: 10652 - RNA, 22 nt, Artificial Sequence
  Synthesized RNAi sequence
acugauagacguguuuuacgcc

SEQ ID NO: 10653 - RNA, 22 nt, Artificial Sequence
  Synthesized RNAi sequence
acugaucuggcacguaacugau

SEQ ID NO: 10654 - RNA, 22 nt, Artificial Sequence
  Synthesized RNAi sequence
acuguuguaccucuaacacacu

SEQ ID NO: 10655 - RNA, 22 nt, Artificial Sequence
  Synthesized RNAi sequence
acuuccucuugucugaugaaca

SEQ ID NO: 10656 - RNA, 22 nt, Artificial Sequence
  Synthesized RNAi sequence
agaagagcaagguucuuuuaaa

SEQ ID NO: 10657 - RNA, 22 nt, Artificial Sequence
  Synthesized RNAi sequence
agacguguuuuacgccgucagg

SEQ ID NO: 10658 - RNA, 22 nt, Artificial Sequence
  Synthesized RNAi sequence
agagcaagguucuuuuaaaagu

SEQ ID NO: 10659 - RNA, 22 nt, Artificial Sequence
  Synthesized RNAi sequence
agaggaugaaauggugaauugc

SEQ ID NO: 10660 - RNA, 22 nt, Artificial Sequence
  Synthesized RNAi sequence
agcaaaagcaaauugagugcua

SEQ ID NO: 10661 - RNA, 22 nt, Artificial Sequence
  Synthesized RNAi sequence
agcaaauugagugcuaaagcaa

SEQ ID NO: 10662 - RNA, 22 nt, Artificial Sequence
  Synthesized RNAi sequence
agcaagguucuuuuaaaaguac

SEQ ID NO: 10663 - RNA, 22 nt, Artificial Sequence
  Synthesized RNAi sequence
agcaagucagugcaaauuuguu

SEQ ID NO: 10664 - RNA, 22 nt, Artificial Sequence
  Synthesized RNAi sequence
agcgaguguuaucagugccaag

SEQ ID NO: 10665 - RNA, 22 nt, Artificial Sequence
  Synthesized RNAi sequence
agcuagaggaugaaauggugaa

SEQ ID NO: 10666 - RNA, 22 nt, Artificial Sequence
  Synthesized RNAi sequence
agcucacaaguagcgaguguua

SEQ ID NO: 10667 - RNA, 22 nt, Artificial Sequence
  Synthesized RNAi sequence
aggacaagcaaaagcaaauuga

SEQ ID NO: 10668 - RNA, 22 nt, Artificial Sequence
  Synthesized RNAi sequence
aggaugaaauggugaauugccc

SEQ ID NO: 10669 - RNA, 22 nt, Artificial Sequence
  Synthesized RNAi sequence
aggugaaacugaucuggcacgu

SEQ ID NO: 10670 - RNA, 22 nt, Artificial Sequence
  Synthesized RNAi sequence
agguucuuuuaaaaguacuguu

SEQ ID NO: 10671 - RNA, 22 nt, Artificial Sequence
  Synthesized RNAi sequence
aguagcgaguguuaucagugcc

SEQ ID NO: 10672 - RNA, 22 nt, Artificial Sequence
  Synthesized RNAi sequence
agucagugcaaauuuguuauca

SEQ ID NO: 10673 - RNA, 22 nt, Artificial Sequence
  Synthesized RNAi sequence
agugauaaagcucacaaguagc

SEQ ID NO: 10674 - RNA, 22 nt, Artificial Sequence
  Synthesized RNAi sequence
agugcaaauuuguuaucagcua

SEQ ID NO: 10675 - RNA, 22 nt, Artificial Sequence
  Synthesized RNAi sequence
agugcuaaagcaagucagugca

SEQ ID NO: 10676 - RNA, 22 nt, Artificial Sequence
  Synthesized RNAi sequence
agugugaagcaaaguguuauaa

SEQ ID NO: 10677 - RNA, 22 nt, Artificial Sequence
  Synthesized RNAi sequence
aguucaaucauucugucuuucu

SEQ ID NO: 10678 - RNA, 22 nt, Artificial Sequence
  Synthesized RNAi sequence
aguucuugaacuuccucuuguc

SEQ ID NO: 10679 - RNA, 22 nt, Artificial Sequence
  Synthesized RNAi sequence
aguuuaggugaaacugaucugg

SEQ ID NO: 10680 - RNA, 22 nt, Artificial Sequence
  Synthesized RNAi sequence
auaaagcucacaaguagcgagu

SEQ ID NO: 10681 - RNA, 22 nt, Artificial Sequence
  Synthesized RNAi sequence
auagacguguuuuacgccguca

SEQ ID NO: 10682 - RNA, 22 nt, Artificial Sequence
  Synthesized RNAi sequence
aucagcuagaggaugaaauggu

SEQ ID NO: 10683 - RNA, 22 nt, Artificial Sequence
  Synthesized RNAi sequence
aucauucugucuuucuuuugag

SEQ ID NO: 10684 - RNA, 22 nt, Artificial Sequence
  Synthesized RNAi sequence
aucuggcacguaacugauagac

SEQ ID NO: 10685 - RNA, 22 nt, Artificial Sequence
  Synthesized RNAi sequence
augaaaguucaaucauucuguc

SEQ ID NO: 10686 - RNA, 22 nt, Artificial Sequence
  Synthesized RNAi sequence
augaaauggugaauugcccucg

SEQ ID NO: 10687 - RNA, 22 nt, Artificial Sequence
  Synthesized RNAi sequence
augaacaguuuaggugaaacug

SEQ ID NO: 10688 - RNA, 22 nt, Artificial Sequence
  Synthesized RNAi sequence
auggugaauugcccucguaugu

SEQ ID NO: 10689 - RNA, 22 nt, Artificial Sequence
  Synthesized RNAi sequence
auguuccagaagagcaagguuc

SEQ ID NO: 10690 - RNA, 22 nt, Artificial Sequence
  Synthesized RNAi sequence
auuaaugaaaguucaaucauuc

SEQ ID NO: 10691 - RNA, 22 nt, Artificial Sequence
  Synthesized RNAi sequence
auucugucuuucuuuugagugu

SEQ ID NO: 10692 - RNA, 22 nt, Artificial Sequence
  Synthesized RNAi sequence
auugagugcuaaagcaagucag

SEQ ID NO: 10693 - RNA, 22 nt, Artificial Sequence
  Synthesized RNAi sequence
auugcccucguauguuccagaa

SEQ ID NO: 10694 - RNA, 22 nt, Artificial Sequence
  Synthesized RNAi sequence
auuuguuaucagcuagaggaug

SEQ ID NO: 10695 - RNA, 22 nt, Artificial Sequence
  Synthesized RNAi sequence
uaaaaguacuguuguaccucua

SEQ ID NO: 10696 - RNA, 22 nt, Artificial Sequence
  Synthesized RNAi sequence
uaaagcaagucagugcaaauuu

SEQ ID NO: 10697 - RNA, 22 nt, Artificial Sequence
  Synthesized RNAi sequence
uaaagcucacaaguagcgagug

SEQ ID NO: 10698 - RNA, 22 nt, Artificial Sequence
  Synthesized RNAi sequence
uaacacacucuugguagugaua

SEQ ID NO: 10699 - RNA, 22 nt, Artificial Sequence
  Synthesized RNAi sequence
uaacugauagacguguuuuacg

SEQ ID NO: 10700 - RNA, 22 nt, Artificial Sequence
  Synthesized RNAi sequence
uaaugaaaguucaaucauucug

SEQ ID NO: 10701 - RNA, 22 nt, Artificial Sequence
  Synthesized RNAi sequence
uaccucuaacacacucuuggua

SEQ ID NO: 10702 - RNA, 22 nt, Artificial Sequence
  Synthesized RNAi sequence
uacgccgucaggacaagcaaaa

SEQ ID NO: 10703 - RNA, 22 nt, Artificial Sequence
  Synthesized RNAi sequence
uagacguguuuuacgccgucag

SEQ ID NO: 10704 - RNA, 22 nt, Artificial Sequence
  Synthesized RNAi sequence
uagaggaugaaauggugaauug

SEQ ID NO: 10705 - RNA, 22 nt, Artificial Sequence
  Synthesized RNAi sequence
uagcgaguguuaucagugccaa

SEQ ID NO: 10706 - RNA, 22 nt, Artificial Sequence
  Synthesized RNAi sequence
uaggugaaacugaucuggcacg

SEQ ID NO: 10707 - RNA, 22 nt, Artificial Sequence
  Synthesized RNAi sequence
uagugauaaagcucacaaguag

SEQ ID NO: 10708 - RNA, 22 nt, Artificial Sequence
  Synthesized RNAi sequence
uaucagcuagaggaugaaaugg

SEQ ID NO: 10709 - RNA, 22 nt, Artificial Sequence
  Synthesized RNAi sequence
uauguuccagaagagcaagguu

SEQ ID NO: 10710 - RNA, 22 nt, Artificial Sequence
  Synthesized RNAi sequence
ucaauuaaugaaaguucaauca

SEQ ID NO: 10711 - RNA, 22 nt, Artificial Sequence
  Synthesized RNAi sequence
ucacaaguagcgaguguuauca

SEQ ID NO: 10712 - RNA, 22 nt, Artificial Sequence
  Synthesized RNAi sequence
ucagcuagaggaugaaauggug

SEQ ID NO: 10713 - RNA, 22 nt, Artificial Sequence
  Synthesized RNAi sequence
ucaggacaagcaaaagcaaauu

SEQ ID NO: 10714 - RNA, 22 nt, Artificial Sequence
  Synthesized RNAi sequence
ucagugcaaauuuguuaucagc

SEQ ID NO: 10715 - RNA, 22 nt, Artificial Sequence
  Synthesized RNAi sequence
ucauucugucuuucuuuugagu

SEQ ID NO: 10716 - RNA, 22 nt, Artificial Sequence
  Synthesized RNAi sequence
uccucuugucugaugaacaguu

SEQ ID NO: 10717 - RNA, 22 nt, Artificial Sequence
  Synthesized RNAi sequence
ucguauguuccagaagagcaag

SEQ ID NO: 10718 - RNA, 22 nt, Artificial Sequence
  Synthesized RNAi sequence
ucuaacacacucuugguaguga

SEQ ID NO: 10719 - RNA, 22 nt, Artificial Sequence
  Synthesized RNAi sequence
ucugaugaacaguuuaggugaa

SEQ ID NO: 10720 - RNA, 22 nt, Artificial Sequence
  Synthesized RNAi sequence
ucuggcacguaacugauagacg

SEQ ID NO: 10721 - RNA, 22 nt, Artificial Sequence
  Synthesized RNAi sequence
ucugucuuucuuuugaguguga

SEQ ID NO: 10722 - RNA, 22 nt, Artificial Sequence
  Synthesized RNAi sequence
ucuugguagugauaaagcucac

SEQ ID NO: 10723 - RNA, 22 nt, Artificial Sequence
  Synthesized RNAi sequence
ucuugucugaugaacaguuuag

SEQ ID NO: 10724 - RNA, 22 nt, Artificial Sequence
  Synthesized RNAi sequence
ucuuucuuuugagugugaagca

SEQ ID NO: 10725 - RNA, 22 nt, Artificial Sequence
  Synthesized RNAi sequence
ucuuuuaaaaguacuguuguac

SEQ ID NO: 10726 - RNA, 22 nt, Artificial Sequence
  Synthesized RNAi sequence
ucuuuugagugugaagcaaagu

SEQ ID NO: 10727 - RNA, 22 nt, Artificial Sequence
  Synthesized RNAi sequence
ugaaacugaucuggcacguaac

SEQ ID NO: 10728 - RNA, 22 nt, Artificial Sequence
  Synthesized RNAi sequence
ugaaaguucaaucauucugucu

SEQ ID NO: 10729 - RNA, 22 nt, Artificial Sequence
  Synthesized RNAi sequence
ugaaauggugaauugcccucgu

SEQ ID NO: 10730 - RNA, 22 nt, Artificial Sequence
  Synthesized RNAi sequence
ugaacaguuuaggugaaacuga

SEQ ID NO: 10731 - RNA, 22 nt, Artificial Sequence
  Synthesized RNAi sequence
ugaacuuccucuugucugauga

SEQ ID NO: 10732 - RNA, 22 nt, Artificial Sequence
  Synthesized RNAi sequence
ugaagcaaaguguuauaaacac

SEQ ID NO: 10733 - RNA, 22 nt, Artificial Sequence
  Synthesized RNAi sequence
ugaauugcccucguauguucca

SEQ ID NO: 10734 - RNA, 22 nt, Artificial Sequence
  Synthesized RNAi sequence
ugagugcuaaagcaagucagug

SEQ ID NO: 10735 - RNA, 22 nt, Artificial Sequence
  Synthesized RNAi sequence
ugagugugaagcaaaguguuau

SEQ ID NO: 10736 - RNA, 22 nt, Artificial Sequence
  Synthesized RNAi sequence
ugauaaagcucacaaguagcga

SEQ ID NO: 10737 - RNA, 22 nt, Artificial Sequence
  Synthesized RNAi sequence
ugaucuggcacguaacugauag

SEQ ID NO: 10738 - RNA, 22 nt, Artificial Sequence
  Synthesized RNAi sequence
ugaugaacaguuuaggugaaac

SEQ ID NO: 10739 - RNA, 22 nt, Artificial Sequence
  Synthesized RNAi sequence
ugcaaauuuguuaucagcuaga

SEQ ID NO: 10740 - RNA, 22 nt, Artificial Sequence
  Synthesized RNAi sequence
ugcccucguauguuccagaaga

SEQ ID NO: 10741 - RNA, 22 nt, Artificial Sequence
  Synthesized RNAi sequence
ugcuaaagcaagucagugcaaa

SEQ ID NO: 10742 - RNA, 22 nt, Artificial Sequence
  Synthesized RNAi sequence
uggcacguaacugauagacgug

SEQ ID NO: 10743 - RNA, 22 nt, Artificial Sequence
  Synthesized RNAi sequence
ugguagugauaaagcucacaag

SEQ ID NO: 10744 - RNA, 22 nt, Artificial Sequence
  Synthesized RNAi sequence
uggugaauugcccucguauguu

SEQ ID NO: 10745 - RNA, 22 nt, Artificial Sequence
  Synthesized RNAi sequence
uguaccucuaacacacucuugg

SEQ ID NO: 10746 - RNA, 22 nt, Artificial Sequence
  Synthesized RNAi sequence
ugucugaugaacaguuuaggug

SEQ ID NO: 10747 - RNA, 22 nt, Artificial Sequence
  Synthesized RNAi sequence
ugucuuucuuuugagugugaag

SEQ ID NO: 10748 - RNA, 22 nt, Artificial Sequence
  Synthesized RNAi sequence
ugugaagcaaaguguuauaaac

SEQ ID NO: 10749 - RNA, 22 nt, Artificial Sequence
  Synthesized RNAi sequence
uguuaucagcuagaggaugaaa

SEQ ID NO: 10750 - RNA, 22 nt, Artificial Sequence
  Synthesized RNAi sequence
uguuccagaagagcaagguucu

SEQ ID NO: 10751 - RNA, 22 nt, Artificial Sequence
  Synthesized RNAi sequence
uguuguaccucuaacacacucu

SEQ ID NO: 10752 - RNA, 22 nt, Artificial Sequence
  Synthesized RNAi sequence
uguuuuacgccgucaggacaag

SEQ ID NO: 10753 - RNA, 22 nt, Artificial Sequence
  Synthesized RNAi sequence
uuaaaaguacuguuguaccucu

SEQ ID NO: 10754 - RNA, 22 nt, Artificial Sequence
  Synthesized RNAi sequence
uuaaugaaaguucaaucauucu

SEQ ID NO: 10755 - RNA, 22 nt, Artificial Sequence
  Synthesized RNAi sequence
uuacgccgucaggacaagcaaa

SEQ ID NO: 10756 - RNA, 22 nt, Artificial Sequence
  Synthesized RNAi sequence
uuaggugaaacugaucuggcac

SEQ ID NO: 10757 - RNA, 22 nt, Artificial Sequence
  Synthesized RNAi sequence
uuaucagcuagaggaugaaaug

SEQ ID NO: 10758 - RNA, 22 nt, Artificial Sequence
  Synthesized RNAi sequence
uucaaucauucugucuuucuuu

SEQ ID NO: 10759 - RNA, 22 nt, Artificial Sequence
  Synthesized RNAi sequence
uuccagaagagcaagguucuuu

SEQ ID NO: 10760 - RNA, 22 nt, Artificial Sequence
  Synthesized RNAi sequence
uuccucuugucugaugaacagu

SEQ ID NO: 10761 - RNA, 22 nt, Artificial Sequence
  Synthesized RNAi sequence
uucuugaacuuccucuugucug

SEQ ID NO: 10762 - RNA, 22 nt, Artificial Sequence
  Synthesized RNAi sequence
uucuuuuaaaaguacuguugua

SEQ ID NO: 10763 - RNA, 22 nt, Artificial Sequence
  Synthesized RNAi sequence
uucuuuugagugugaagcaaag

SEQ ID NO: 10764 - RNA, 22 nt, Artificial Sequence
  Synthesized RNAi sequence
uugaacuuccucuugucugaug

SEQ ID NO: 10765 - RNA, 22 nt, Artificial Sequence
  Synthesized RNAi sequence
uugagugcuaaagcaagucagu

SEQ ID NO: 10766 - RNA, 22 nt, Artificial Sequence
  Synthesized RNAi sequence
uugagugugaagcaaaguguua

SEQ ID NO: 10767 - RNA, 22 nt, Artificial Sequence
  Synthesized RNAi sequence
uugcccucguauguuccagaag

SEQ ID NO: 10768 - RNA, 22 nt, Artificial Sequence
  Synthesized RNAi sequence
uugguagugauaaagcucacaa

SEQ ID NO: 10769 - RNA, 22 nt, Artificial Sequence
  Synthesized RNAi sequence
uuguaccucuaacacacucuug

SEQ ID NO: 10770 - RNA, 22 nt, Artificial Sequence
  Synthesized RNAi sequence
uugucugaugaacaguuuaggu

SEQ ID NO: 10771 - RNA, 22 nt, Artificial Sequence
  Synthesized RNAi sequence
uuguuaucagcuagaggaugaa

SEQ ID NO: 10772 - RNA, 22 nt, Artificial Sequence
  Synthesized RNAi sequence
uuuaaaaguacuguuguaccuc

SEQ ID NO: 10773 - RNA, 22 nt, Artificial Sequence
  Synthesized RNAi sequence
uuuacgccgucaggacaagcaa

SEQ ID NO: 10774 - RNA, 22 nt, Artificial Sequence
  Synthesized RNAi sequence
uuuaggugaaacugaucuggca

SEQ ID NO: 10775 - RNA, 22 nt, Artificial Sequence
  Synthesized RNAi sequence
uuucuuuugagugugaagcaaa

SEQ ID NO: 10776 - RNA, 22 nt, Artificial Sequence
  Synthesized RNAi sequence
uuugagugugaagcaaaguguu

SEQ ID NO: 10777 - RNA, 22 nt, Artificial Sequence
  Synthesized RNAi sequence
uuuguuaucagcuagaggauga

SEQ ID NO: 10778 - RNA, 22 nt, Artificial Sequence
  Synthesized RNAi sequence
uuuuaaaaguacuguuguaccu

SEQ ID NO: 10779 - RNA, 22 nt, Artificial Sequence
  Synthesized RNAi sequence
uuuuacgccgucaggacaagca

SEQ ID NO: 10780 - RNA, 22 nt, Artificial Sequence
  Synthesized RNAi sequence
uuuugagugugaagcaaagugu

SEQ ID NO: 10781 - RNA, 22 nt, Artificial Sequence
  Synthesized RNAi sequence
aaacaagaaauuucauguucgu

SEQ ID NO: 10782 - RNA, 22 nt, Artificial Sequence
  Synthesized RNAi sequence
aaauuucauguucguuuaggcg

SEQ ID NO: 10783 - RNA, 22 nt, Artificial Sequence
  Synthesized RNAi sequence
aacaagaaauuucauguucguu

SEQ ID NO: 10784 - RNA, 22 nt, Artificial Sequence
  Synthesized RNAi sequence
aaccaaaagauaauaagcauaa

SEQ ID NO: 10785 - RNA, 22 nt, Artificial Sequence
  Synthesized RNAi sequence
aagaaaacaagaaauuucaugu

SEQ ID NO: 10786 - RNA, 22 nt, Artificial Sequence
  Synthesized RNAi sequence
aagaaauuucauguucguuuag

SEQ ID NO: 10787 - RNA, 22 nt, Artificial Sequence
  Synthesized RNAi sequence
aagcauaauuaaaacaaggaau

SEQ ID NO: 10788 - RNA, 22 nt, Artificial Sequence
  Synthesized RNAi sequence
aagugagaaccaaaagauaaua

SEQ ID NO: 10789 - RNA, 22 nt, Artificial Sequence
  Synthesized RNAi sequence
aaguuucauuaugaucuugcag

SEQ ID NO: 10790 - RNA, 22 nt, Artificial Sequence
  Synthesized RNAi sequence
aauaagcauaauuaaaacaagg

SEQ ID NO: 10791 - RNA, 22 nt, Artificial Sequence
  Synthesized RNAi sequence
aauuucauguucguuuaggcgu

SEQ ID NO: 10792 - RNA, 22 nt, Artificial Sequence
  Synthesized RNAi sequence
acaagaaauuucauguucguuu

SEQ ID NO: 10793 - RNA, 22 nt, Artificial Sequence
  Synthesized RNAi sequence
acaaguuucauuaugaucuugc

SEQ ID NO: 10794 - RNA, 22 nt, Artificial Sequence
  Synthesized RNAi sequence
accaaaagauaauaagcauaau

SEQ ID NO: 10795 - RNA, 22 nt, Artificial Sequence
  Synthesized RNAi sequence
agaaaacaagaaauuucauguu

SEQ ID NO: 10796 - RNA, 22 nt, Artificial Sequence
  Synthesized RNAi sequence
agaaauuucauguucguuuagg

SEQ ID NO: 10797 - RNA, 22 nt, Artificial Sequence
  Synthesized RNAi sequence
agaaccaaaagauaauaagcau

SEQ ID NO: 10798 - RNA, 22 nt, Artificial Sequence
  Synthesized RNAi sequence
agauaauaagcauaauuaaaac

SEQ ID NO: 10799 - RNA, 22 nt, Artificial Sequence
  Synthesized RNAi sequence
agcauaauuaaaacaaggaaua

SEQ ID NO: 10800 - RNA, 22 nt, Artificial Sequence
  Synthesized RNAi sequence
aggcgugacaaguuucauuaug

SEQ ID NO: 10801 - RNA, 22 nt, Artificial Sequence
  Synthesized RNAi sequence
agugagaaccaaaagauaauaa

SEQ ID NO: 10802 - RNA, 22 nt, Artificial Sequence
  Synthesized RNAi sequence
aguucaagugagaaccaaaaga

SEQ ID NO: 10803 - RNA, 22 nt, Artificial Sequence
  Synthesized RNAi sequence
aguuucauuaugaucuugcagu

SEQ ID NO: 10804 - RNA, 22 nt, Artificial Sequence
  Synthesized RNAi sequence
auaagcauaauuaaaacaagga

SEQ ID NO: 10805 - RNA, 22 nt, Artificial Sequence
  Synthesized RNAi sequence
aucuugcaguucaagugagaac

SEQ ID NO: 10806 - RNA, 22 nt, Artificial Sequence
  Synthesized RNAi sequence
augaucuugcaguucaagugag

SEQ ID NO: 10807 - RNA, 22 nt, Artificial Sequence
  Synthesized RNAi sequence
augauuccuaagaaaacaagaa

SEQ ID NO: 10808 - RNA, 22 nt, Artificial Sequence
  Synthesized RNAi sequence
auguucguuuaggcgugacaag

SEQ ID NO: 10809 - RNA, 22 nt, Artificial Sequence
  Synthesized RNAi sequence
auuaugaucuugcaguucaagu

SEQ ID NO: 10810 - RNA, 22 nt, Artificial Sequence
  Synthesized RNAi sequence
auuccuaagaaaacaagaaauu

SEQ ID NO: 10811 - RNA, 22 nt, Artificial Sequence
  Synthesized RNAi sequence
auuucauguucguuuaggcgug

SEQ ID NO: 10812 - RNA, 22 nt, Artificial Sequence
  Synthesized RNAi sequence
uaagaaaacaagaaauuucaug

SEQ ID NO: 10813 - RNA, 22 nt, Artificial Sequence
  Synthesized RNAi sequence
uaagcauaauuaaaacaaggaa

SEQ ID NO: 10814 - RNA, 22 nt, Artificial Sequence
  Synthesized RNAi sequence
uaggcgugacaaguuucauuau

SEQ ID NO: 10815 - RNA, 22 nt, Artificial Sequence
  Synthesized RNAi sequence
uaugaucuugcaguucaaguga

SEQ ID NO: 10816 - RNA, 22 nt, Artificial Sequence
  Synthesized RNAi sequence
ucaagugagaaccaaaagauaa

SEQ ID NO: 10817 - RNA, 22 nt, Artificial Sequence
  Synthesized RNAi sequence
ucauguucguuuaggcgugaca

SEQ ID NO: 10818 - RNA, 22 nt, Artificial Sequence
  Synthesized RNAi sequence
ucauuaugaucuugcaguucaa

SEQ ID NO: 10819 - RNA, 22 nt, Artificial Sequence
  Synthesized RNAi sequence
uccuaagaaaacaagaaauuuc

SEQ ID NO: 10820 - RNA, 22 nt, Artificial Sequence
  Synthesized RNAi sequence
ucguuuaggcgugacaaguuuc

SEQ ID NO: 10821 - RNA, 22 nt, Artificial Sequence
  Synthesized RNAi sequence
ucuugcaguucaagugagaacc

SEQ ID NO: 10822 - RNA, 22 nt, Artificial Sequence
  Synthesized RNAi sequence
ugacaaguuucauuaugaucuu

SEQ ID NO: 10823 - RNA, 22 nt, Artificial Sequence
  Synthesized RNAi sequence
ugagaaccaaaagauaauaagc

SEQ ID NO: 10824 - RNA, 22 nt, Artificial Sequence
  Synthesized RNAi sequence
ugaucuugcaguucaagugaga

SEQ ID NO: 10825 - RNA, 22 nt, Artificial Sequence
  Synthesized RNAi sequence
ugauuccuaagaaaacaagaaa

SEQ ID NO: 10826 - RNA, 22 nt, Artificial Sequence
  Synthesized RNAi sequence
ugcaguucaagugagaaccaaa

SEQ ID NO: 10827 - RNA, 22 nt, Artificial Sequence
  Synthesized RNAi sequence
uguucguuuaggcgugacaagu

SEQ ID NO: 10828 - RNA, 22 nt, Artificial Sequence
  Synthesized RNAi sequence
uuaggcgugacaaguuucauua

SEQ ID NO: 10829 - RNA, 22 nt, Artificial Sequence
  Synthesized RNAi sequence
uuaugaucuugcaguucaagug

SEQ ID NO: 10830 - RNA, 22 nt, Artificial Sequence
  Synthesized RNAi sequence
uucaagugagaaccaaaagaua

SEQ ID NO: 10831 - RNA, 22 nt, Artificial Sequence
  Synthesized RNAi sequence
uucauguucguuuaggcgugac

SEQ ID NO: 10832 - RNA, 22 nt, Artificial Sequence
  Synthesized RNAi sequence
uuccuaagaaaacaagaaauuu

SEQ ID NO: 10833 - RNA, 22 nt, Artificial Sequence
  Synthesized RNAi sequence
uucguuuaggcgugacaaguuu

SEQ ID NO: 10834 - RNA, 22 nt, Artificial Sequence
  Synthesized RNAi sequence
uuuaggcgugacaaguuucauu

SEQ ID NO: 10835 - RNA, 22 nt, Artificial Sequence
  Synthesized RNAi sequence
uuucauguucguuuaggcguga

SEQ ID NO: 10836 - RNA, 22 nt, Artificial Sequence
  Synthesized RNAi sequence
uuucauuaugaucuugcaguuc

SEQ ID NO: 10837 - RNA, 22 nt, Artificial Sequence
  Synthesized RNAi sequence
aaacaggaaacuguauaauuac

SEQ ID NO: 10838 - RNA, 22 nt, Artificial Sequence
  Synthesized RNAi sequence
aaacuacauucuuggugaaaug

SEQ ID NO: 10839 - RNA, 22 nt, Artificial Sequence
  Synthesized RNAi sequence
aaacuguauaauuaccgauauc

SEQ ID NO: 10840 - RNA, 22 nt, Artificial Sequence
  Synthesized RNAi sequence
aaagguaaacaggaaacuguau

SEQ ID NO: 10841 - RNA, 22 nt, Artificial Sequence
  Synthesized RNAi sequence
aaaggugcugauuuucuagcuc

SEQ ID NO: 10842 - RNA, 22 nt, Artificial Sequence
  Synthesized RNAi sequence
aaaucuaaaacaacacgaacgu

SEQ ID NO: 10843 - RNA, 22 nt, Artificial Sequence
  Synthesized RNAi sequence
aaaugcagcuacaguugugaug

SEQ ID NO: 10844 - RNA, 22 nt, Artificial Sequence
  Synthesized RNAi sequence
aacaacgcacuacaagacuacc

SEQ ID NO: 10845 - RNA, 22 nt, Artificial Sequence
  Synthesized RNAi sequence
aacaggaaacuguauaauuacc

SEQ ID NO: 10846 - RNA, 22 nt, Artificial Sequence
  Synthesized RNAi sequence
aacgaacaacgcacuacaagac

SEQ ID NO: 10847 - RNA, 22 nt, Artificial Sequence
  Synthesized RNAi sequence
aacgcacuacaagacuacccaa

SEQ ID NO: 10848 - RNA, 22 nt, Artificial Sequence
  Synthesized RNAi sequence
aacuacauaugguugauguuga

SEQ ID NO: 10849 - RNA, 22 nt, Artificial Sequence
  Synthesized RNAi sequence
aacuacauucuuggugaaaugc

SEQ ID NO: 10850 - RNA, 22 nt, Artificial Sequence
  Synthesized RNAi sequence
aacuguauaauuaccgauaucg

SEQ ID NO: 10851 - RNA, 22 nt, Artificial Sequence
  Synthesized RNAi sequence
aagacuacccaauuuagguucc

SEQ ID NO: 10852 - RNA, 22 nt, Artificial Sequence
  Synthesized RNAi sequence
aagguaaacaggaaacuguaua

SEQ ID NO: 10853 - RNA, 22 nt, Artificial Sequence
  Synthesized RNAi sequence
aaggugcugauuuucuagcucc

SEQ ID NO: 10854 - RNA, 22 nt, Artificial Sequence
  Synthesized RNAi sequence
aagugaauaggacacgggucau

SEQ ID NO: 10855 - RNA, 22 nt, Artificial Sequence
  Synthesized RNAi sequence
aauagaagugaauaggacacgg

SEQ ID NO: 10856 - RNA, 22 nt, Artificial Sequence
  Synthesized RNAi sequence
aauaggacacgggucaucaacu

SEQ ID NO: 10857 - RNA, 22 nt, Artificial Sequence
  Synthesized RNAi sequence
aauauaccauuuagaauagaag

SEQ ID NO: 10858 - RNA, 22 nt, Artificial Sequence
  Synthesized RNAi sequence
aaugcagcuacaguugugauga

SEQ ID NO: 10859 - RNA, 22 nt, Artificial Sequence
  Synthesized RNAi sequence
aaugggugauuuagaaccagcc

SEQ ID NO: 10860 - RNA, 22 nt, Artificial Sequence
  Synthesized RNAi sequence
aauuaaaggugcugauuuucua

SEQ ID NO: 10861 - RNA, 22 nt, Artificial Sequence
  Synthesized RNAi sequence
aauuaauuguaaaagguaaaca

SEQ ID NO: 10862 - RNA, 22 nt, Artificial Sequence
  Synthesized RNAi sequence
aauuaccgauaucgauguacug

SEQ ID NO: 10863 - RNA, 22 nt, Artificial Sequence
  Synthesized RNAi sequence
aauucaauuaaaggugcugauu

SEQ ID NO: 10864 - RNA, 22 nt, Artificial Sequence
  Synthesized RNAi sequence
aauuguaaaagguaaacaggaa

SEQ ID NO: 10865 - RNA, 22 nt, Artificial Sequence
  Synthesized RNAi sequence
aauuuagguuccuggcaauuaa

SEQ ID NO: 10866 - RNA, 22 nt, Artificial Sequence
  Synthesized RNAi sequence
acaacgcacuacaagacuaccc

SEQ ID NO: 10867 - RNA, 22 nt, Artificial Sequence
  Synthesized RNAi sequence
acaagacuacccaauuuagguu

SEQ ID NO: 10868 - RNA, 22 nt, Artificial Sequence
  Synthesized RNAi sequence
acaauucaauuaaaggugcuga

SEQ ID NO: 10869 - RNA, 22 nt, Artificial Sequence
  Synthesized RNAi sequence
acacgggucaucaacuacauau

SEQ ID NO: 10870 - RNA, 22 nt, Artificial Sequence
  Synthesized RNAi sequence
acaggaaacuguauaauuaccg

SEQ ID NO: 10871 - RNA, 22 nt, Artificial Sequence
  Synthesized RNAi sequence
acaguugugaugauuccuaaga

SEQ ID NO: 10872 - RNA, 22 nt, Artificial Sequence
  Synthesized RNAi sequence
acauaugguugauguugaguac

SEQ ID NO: 10873 - RNA, 22 nt, Artificial Sequence
  Synthesized RNAi sequence
acaugacuguaaacuacauucu

SEQ ID NO: 10874 - RNA, 22 nt, Artificial Sequence
  Synthesized RNAi sequence
acauucuuggugaaaugcagcu

SEQ ID NO: 10875 - RNA, 22 nt, Artificial Sequence
  Synthesized RNAi sequence
accauuuagaauagaagugaau

SEQ ID NO: 10876 - RNA, 22 nt, Artificial Sequence
  Synthesized RNAi sequence
acccaauuuagguuccuggcaa

SEQ ID NO: 10877 - RNA, 22 nt, Artificial Sequence
  Synthesized RNAi sequence
acgaacaacgcacuacaagacu

SEQ ID NO: 10878 - RNA, 22 nt, Artificial Sequence
  Synthesized RNAi sequence
acgcacaauucaauuaaaggug

SEQ ID NO: 10879 - RNA, 22 nt, Artificial Sequence
  Synthesized RNAi sequence
acgggucaucaacuacauaugg

SEQ ID NO: 10880 - RNA, 22 nt, Artificial Sequence
  Synthesized RNAi sequence
acuacaagacuacccaauuuag

SEQ ID NO: 10881 - RNA, 22 nt, Artificial Sequence
  Synthesized RNAi sequence
acuacauaugguugauguugag

SEQ ID NO: 10882 - RNA, 22 nt, Artificial Sequence
  Synthesized RNAi sequence
acuacauucuuggugaaaugca

SEQ ID NO: 10883 - RNA, 22 nt, Artificial Sequence
  Synthesized RNAi sequence
acuacccaauuuagguuccugg

SEQ ID NO: 10884 - RNA, 22 nt, Artificial Sequence
  Synthesized RNAi sequence
acucuaauauaccauuuagaau

SEQ ID NO: 10885 - RNA, 22 nt, Artificial Sequence
  Synthesized RNAi sequence
acugaaugggugauuuagaacc

SEQ ID NO: 10886 - RNA, 22 nt, Artificial Sequence
  Synthesized RNAi sequence
acuguaaacuacauucuuggug

SEQ ID NO: 10887 - RNA, 22 nt, Artificial Sequence
  Synthesized RNAi sequence
acuguauaauuaccgauaucga

SEQ ID NO: 10888 - RNA, 22 nt, Artificial Sequence
  Synthesized RNAi sequence
agaaccagccucauccacgcac

SEQ ID NO: 10889 - RNA, 22 nt, Artificial Sequence
  Synthesized RNAi sequence
agaagugaauaggacacggguc

SEQ ID NO: 10890 - RNA, 22 nt, Artificial Sequence
  Synthesized RNAi sequence
agaauagaagugaauaggacac

SEQ ID NO: 10891 - RNA, 22 nt, Artificial Sequence
  Synthesized RNAi sequence
agacauuuuaguuuguucguuu

SEQ ID NO: 10892 - RNA, 22 nt, Artificial Sequence
  Synthesized RNAi sequence
agacuacccaauuuagguuccu

SEQ ID NO: 10893 - RNA, 22 nt, Artificial Sequence
  Synthesized RNAi sequence
agccucauccacgcacaauuca

SEQ ID NO: 10894 - RNA, 22 nt, Artificial Sequence
  Synthesized RNAi sequence
agcuacaguugugaugauuccu

SEQ ID NO: 10895 - RNA, 22 nt, Artificial Sequence
  Synthesized RNAi sequence
agcuccuacucuaauauaccau

SEQ ID NO: 10896 - RNA, 22 nt, Artificial Sequence
  Synthesized RNAi sequence
aggaaacuguauaauuaccgau

SEQ ID NO: 10897 - RNA, 22 nt, Artificial Sequence
  Synthesized RNAi sequence
aggacacgggucaucaacuaca

SEQ ID NO: 10898 - RNA, 22 nt, Artificial Sequence
  Synthesized RNAi sequence
agguaaacaggaaacuguauaa

SEQ ID NO: 10899 - RNA, 22 nt, Artificial Sequence
  Synthesized RNAi sequence
aggugcugauuuucuagcuccu

SEQ ID NO: 10900 - RNA, 22 nt, Artificial Sequence
  Synthesized RNAi sequence
agguuccuggcaauuaauugua

SEQ ID NO: 10901 - RNA, 22 nt, Artificial Sequence
  Synthesized RNAi sequence
aguacaugacuguaaacuacau

SEQ ID NO: 10902 - RNA, 22 nt, Artificial Sequence
  Synthesized RNAi sequence
agugaauaggacacgggucauc

SEQ ID NO: 10903 - RNA, 22 nt, Artificial Sequence
  Synthesized RNAi sequence
aguugugaugauuccuaagaaa

SEQ ID NO: 10904 - RNA, 22 nt, Artificial Sequence
  Synthesized RNAi sequence
aguuuguucguuuagaugaaau

SEQ ID NO: 10905 - RNA, 22 nt, Artificial Sequence
  Synthesized RNAi sequence
auaauuaccgauaucgauguac

SEQ ID NO: 10906 - RNA, 22 nt, Artificial Sequence
  Synthesized RNAi sequence
auagaagugaauaggacacggg

SEQ ID NO: 10907 - RNA, 22 nt, Artificial Sequence
  Synthesized RNAi sequence
auaggacacgggucaucaacua

SEQ ID NO: 10908 - RNA, 22 nt, Artificial Sequence
  Synthesized RNAi sequence
auauaccauuuagaauagaagu

SEQ ID NO: 10909 - RNA, 22 nt, Artificial Sequence
  Synthesized RNAi sequence
auaucgauguacugaaugggug

SEQ ID NO: 10910 - RNA, 22 nt, Artificial Sequence
  Synthesized RNAi sequence
aucaacuacauaugguugaugu

SEQ ID NO: 10911 - RNA, 22 nt, Artificial Sequence
  Synthesized RNAi sequence
aucagacauuuuaguuuguucg

SEQ ID NO: 10912 - RNA, 22 nt, Artificial Sequence
  Synthesized RNAi sequence
auccacgcacaauucaauuaaa

SEQ ID NO: 10913 - RNA, 22 nt, Artificial Sequence
  Synthesized RNAi sequence
aucgauguacugaaugggugau

SEQ ID NO: 10914 - RNA, 22 nt, Artificial Sequence
  Synthesized RNAi sequence
augaaaucuaaaacaacacgaa

SEQ ID NO: 10915 - RNA, 22 nt, Artificial Sequence
  Synthesized RNAi sequence
augacuguaaacuacauucuug

SEQ ID NO: 10916 - RNA, 22 nt, Artificial Sequence
  Synthesized RNAi sequence
augcagcuacaguugugaugau

SEQ ID NO: 10917 - RNA, 22 nt, Artificial Sequence
  Synthesized RNAi sequence
augggugauuuagaaccagccu

SEQ ID NO: 10918 - RNA, 22 nt, Artificial Sequence
  Synthesized RNAi sequence
augguugauguugaguacauga

SEQ ID NO: 10919 - RNA, 22 nt, Artificial Sequence
  Synthesized RNAi sequence
auguacugaaugggugauuuag

SEQ ID NO: 10920 - RNA, 22 nt, Artificial Sequence
  Synthesized RNAi sequence
auguugaguacaugacuguaaa

SEQ ID NO: 10921 - RNA, 22 nt, Artificial Sequence
  Synthesized RNAi sequence
auuaaaggugcugauuuucuag

SEQ ID NO: 10922 - RNA, 22 nt, Artificial Sequence
  Synthesized RNAi sequence
auuaauuguaaaagguaaacag

SEQ ID NO: 10923 - RNA, 22 nt, Artificial Sequence
  Synthesized RNAi sequence
auuaccgauaucgauguacuga

SEQ ID NO: 10924 - RNA, 22 nt, Artificial Sequence
  Synthesized RNAi sequence
auuaucagacauuuuaguuugu

SEQ ID NO: 10925 - RNA, 22 nt, Artificial Sequence
  Synthesized RNAi sequence
auucaauuaaaggugcugauuu

SEQ ID NO: 10926 - RNA, 22 nt, Artificial Sequence
  Synthesized RNAi sequence
auucuuggugaaaugcagcuac

SEQ ID NO: 10927 - RNA, 22 nt, Artificial Sequence
  Synthesized RNAi sequence
auuguaaaagguaaacaggaaa

SEQ ID NO: 10928 - RNA, 22 nt, Artificial Sequence
  Synthesized RNAi sequence
auuuagaaccagccucauccac

SEQ ID NO: 10929 - RNA, 22 nt, Artificial Sequence
  Synthesized RNAi sequence
auuuagaauagaagugaauagg

SEQ ID NO: 10930 - RNA, 22 nt, Artificial Sequence
  Synthesized RNAi sequence
auuuagguuccuggcaauuaau

SEQ ID NO: 10931 - RNA, 22 nt, Artificial Sequence
  Synthesized RNAi sequence
auuuuaguuuguucguuuagau

SEQ ID NO: 10932 - RNA, 22 nt, Artificial Sequence
  Synthesized RNAi sequence
auuuucuagcuccuacucuaau

SEQ ID NO: 10933 - RNA, 22 nt, Artificial Sequence
  Synthesized RNAi sequence
uaaaagguaaacaggaaacugu

SEQ ID NO: 10934 - RNA, 22 nt, Artificial Sequence
  Synthesized RNAi sequence
uaaacaggaaacuguauaauua

SEQ ID NO: 10935 - RNA, 22 nt, Artificial Sequence
  Synthesized RNAi sequence
uaaacuacauucuuggugaaau

SEQ ID NO: 10936 - RNA, 22 nt, Artificial Sequence
  Synthesized RNAi sequence
uaaaggugcugauuuucuagcu

SEQ ID NO: 10937 - RNA, 22 nt, Artificial Sequence
  Synthesized RNAi sequence
uaauauaccauuuagaauagaa

SEQ ID NO: 10938 - RNA, 22 nt, Artificial Sequence
  Synthesized RNAi sequence
uaauuaccgauaucgauguacu

SEQ ID NO: 10939 - RNA, 22 nt, Artificial Sequence
  Synthesized RNAi sequence
uaauuguaaaagguaaacagga

SEQ ID NO: 10940 - RNA, 22 nt, Artificial Sequence
  Synthesized RNAi sequence
uacaagacuacccaauuuaggu

SEQ ID NO: 10941 - RNA, 22 nt, Artificial Sequence
  Synthesized RNAi sequence
uacaguugugaugauuccuaag

SEQ ID NO: 10942 - RNA, 22 nt, Artificial Sequence
  Synthesized RNAi sequence
uacauaugguugauguugagua

SEQ ID NO: 10943 - RNA, 22 nt, Artificial Sequence
  Synthesized RNAi sequence
uacaugacuguaaacuacauuc

SEQ ID NO: 10944 - RNA, 22 nt, Artificial Sequence
  Synthesized RNAi sequence
uacauucuuggugaaaugcagc

SEQ ID NO: 10945 - RNA, 22 nt, Artificial Sequence
  Synthesized RNAi sequence
uaccauuuagaauagaagugaa

SEQ ID NO: 10946 - RNA, 22 nt, Artificial Sequence
  Synthesized RNAi sequence
uacccaauuuagguuccuggca

SEQ ID NO: 10947 - RNA, 22 nt, Artificial Sequence
  Synthesized RNAi sequence
uaccgauaucgauguacugaau

SEQ ID NO: 10948 - RNA, 22 nt, Artificial Sequence
  Synthesized RNAi sequence
uacucuaauauaccauuuagaa

SEQ ID NO: 10949 - RNA, 22 nt, Artificial Sequence
  Synthesized RNAi sequence
uacugaaugggugauuuagaac

SEQ ID NO: 10950 - RNA, 22 nt, Artificial Sequence
  Synthesized RNAi sequence
uagaaccagccucauccacgca

SEQ ID NO: 10951 - RNA, 22 nt, Artificial Sequence
  Synthesized RNAi sequence
uagaagugaauaggacacgggu

SEQ ID NO: 10952 - RNA, 22 nt, Artificial Sequence
  Synthesized RNAi sequence
uagaauagaagugaauaggaca

SEQ ID NO: 10953 - RNA, 22 nt, Artificial Sequence
  Synthesized RNAi sequence
uagcuccuacucuaauauacca

SEQ ID NO: 10954 - RNA, 22 nt, Artificial Sequence
  Synthesized RNAi sequence
uaggacacgggucaucaacuac

SEQ ID NO: 10955 - RNA, 22 nt, Artificial Sequence
  Synthesized RNAi sequence
uagguuccuggcaauuaauugu

SEQ ID NO: 10956 - RNA, 22 nt, Artificial Sequence
  Synthesized RNAi sequence
uaguuuguucguuuagaugaaa

SEQ ID NO: 10957 - RNA, 22 nt, Artificial Sequence
  Synthesized RNAi sequence
uauaauuaccgauaucgaugua

SEQ ID NO: 10958 - RNA, 22 nt, Artificial Sequence
  Synthesized RNAi sequence
uaucagacauuuuaguuuguuc

SEQ ID NO: 10959 - RNA, 22 nt, Artificial Sequence
  Synthesized RNAi sequence
uaucgauguacugaauggguga

SEQ ID NO: 10960 - RNA, 22 nt, Artificial Sequence
  Synthesized RNAi sequence
uaugguugauguugaguacaug

SEQ ID NO: 10961 - RNA, 22 nt, Artificial Sequence
  Synthesized RNAi sequence
ucaacuacauaugguugauguu

SEQ ID NO: 10962 - RNA, 22 nt, Artificial Sequence
  Synthesized RNAi sequence
ucagacauuuuaguuuguucgu

SEQ ID NO: 10963 - RNA, 22 nt, Artificial Sequence
  Synthesized RNAi sequence
ucaucaacuacauaugguugau

SEQ ID NO: 10964 - RNA, 22 nt, Artificial Sequence
  Synthesized RNAi sequence
uccacgcacaauucaauuaaag

SEQ ID NO: 10965 - RNA, 22 nt, Artificial Sequence
  Synthesized RNAi sequence
uccauuaucagacauuuuaguu

SEQ ID NO: 10966 - RNA, 22 nt, Artificial Sequence
  Synthesized RNAi sequence
uccuacucuaauauaccauuua

SEQ ID NO: 10967 - RNA, 22 nt, Artificial Sequence
  Synthesized RNAi sequence
uccuggcaauuaauuguaaaag

SEQ ID NO: 10968 - RNA, 22 nt, Artificial Sequence
  Synthesized RNAi sequence
ucgauguacugaaugggugauu

SEQ ID NO: 10969 - RNA, 22 nt, Artificial Sequence
  Synthesized RNAi sequence
ucguuuagaugaaaucuaaaac

SEQ ID NO: 10970 - RNA, 22 nt, Artificial Sequence
  Synthesized RNAi sequence
ucuaauauaccauuuagaauag

SEQ ID NO: 10971 - RNA, 22 nt, Artificial Sequence
  Synthesized RNAi sequence
ucuagcuccuacucuaauauac

SEQ ID NO: 10972 - RNA, 22 nt, Artificial Sequence
  Synthesized RNAi sequence
ucuuggugaaaugcagcuacag

SEQ ID NO: 10973 - RNA, 22 nt, Artificial Sequence
  Synthesized RNAi sequence
ugaaaucuaaaacaacacgaac

SEQ ID NO: 10974 - RNA, 22 nt, Artificial Sequence
  Synthesized RNAi sequence
ugaaaugcagcuacaguuguga

SEQ ID NO: 10975 - RNA, 22 nt, Artificial Sequence
  Synthesized RNAi sequence
ugaauaggacacgggucaucaa

SEQ ID NO: 10976 - RNA, 22 nt, Artificial Sequence
  Synthesized RNAi sequence
ugaaugggugauuuagaaccag

SEQ ID NO: 10977 - RNA, 22 nt, Artificial Sequence
  Synthesized RNAi sequence
ugacuguaaacuacauucuugg

SEQ ID NO: 10978 - RNA, 22 nt, Artificial Sequence
  Synthesized RNAi sequence
ugaguacaugacuguaaacuac

SEQ ID NO: 10979 - RNA, 22 nt, Artificial Sequence
  Synthesized RNAi sequence
ugauguugaguacaugacugua

SEQ ID NO: 10980 - RNA, 22 nt, Artificial Sequence
  Synthesized RNAi sequence
ugauuuagaaccagccucaucc

SEQ ID NO: 10981 - RNA, 22 nt, Artificial Sequence
  Synthesized RNAi sequence
ugauuuucuagcuccuacucua

SEQ ID NO: 10982 - RNA, 22 nt, Artificial Sequence
  Synthesized RNAi sequence
ugcagcuacaguugugaugauu

SEQ ID NO: 10983 - RNA, 22 nt, Artificial Sequence
  Synthesized RNAi sequence
uggcaauuaauuguaaaaggua

SEQ ID NO: 10984 - RNA, 22 nt, Artificial Sequence
  Synthesized RNAi sequence
ugggguccauuaucagacauuu

SEQ ID NO: 10985 - RNA, 22 nt, Artificial Sequence
  Synthesized RNAi sequence
ugggugauuuagaaccagccuc

SEQ ID NO: 10986 - RNA, 22 nt, Artificial Sequence
  Synthesized RNAi sequence
uggugaaaugcagcuacaguug

SEQ ID NO: 10987 - RNA, 22 nt, Artificial Sequence
  Synthesized RNAi sequence
ugguugauguugaguacaugac

SEQ ID NO: 10988 - RNA, 22 nt, Artificial Sequence
  Synthesized RNAi sequence
uguaaaagguaaacaggaaacu

SEQ ID NO: 10989 - RNA, 22 nt, Artificial Sequence
  Synthesized RNAi sequence
uguaaacuacauucuuggugaa

SEQ ID NO: 10990 - RNA, 22 nt, Artificial Sequence
  Synthesized RNAi sequence
uguacugaaugggugauuuaga

SEQ ID NO: 10991 - RNA, 22 nt, Artificial Sequence
  Synthesized RNAi sequence
uguauaauuaccgauaucgaug

SEQ ID NO: 10992 - RNA, 22 nt, Artificial Sequence
  Synthesized RNAi sequence
uguucguuuagaugaaaucuaa

SEQ ID NO: 10993 - RNA, 22 nt, Artificial Sequence
  Synthesized RNAi sequence
uguugaguacaugacuguaaac

SEQ ID NO: 10994 - RNA, 22 nt, Artificial Sequence
  Synthesized RNAi sequence
uuaaaggugcugauuuucuagc

SEQ ID NO: 10995 - RNA, 22 nt, Artificial Sequence
  Synthesized RNAi sequence
uuaauuguaaaagguaaacagg

SEQ ID NO: 10996 - RNA, 22 nt, Artificial Sequence
  Synthesized RNAi sequence
uuaccgauaucgauguacugaa

SEQ ID NO: 10997 - RNA, 22 nt, Artificial Sequence
  Synthesized RNAi sequence
uuagaaccagccucauccacgc

SEQ ID NO: 10998 - RNA, 22 nt, Artificial Sequence
  Synthesized RNAi sequence
uuagaauagaagugaauaggac

SEQ ID NO: 10999 - RNA, 22 nt, Artificial Sequence
  Synthesized RNAi sequence
uuagaugaaaucuaaaacaaca

SEQ ID NO: 11000 - RNA, 22 nt, Artificial Sequence
  Synthesized RNAi sequence
uuagguuccuggcaauuaauug

SEQ ID NO: 11001 - RNA, 22 nt, Artificial Sequence
  Synthesized RNAi sequence
uuaguuuguucguuuagaugaa

SEQ ID NO: 11002 - RNA, 22 nt, Artificial Sequence
  Synthesized RNAi sequence
uuaucagacauuuuaguuuguu

SEQ ID NO: 11003 - RNA, 22 nt, Artificial Sequence
  Synthesized RNAi sequence
uuccuggcaauuaauuguaaaa

SEQ ID NO: 11004 - RNA, 22 nt, Artificial Sequence
  Synthesized RNAi sequence
uucguuuagaugaaaucuaaaa

SEQ ID NO: 11005 - RNA, 22 nt, Artificial Sequence
  Synthesized RNAi sequence
uucuagcuccuacucuaauaua

SEQ ID NO: 11006 - RNA, 22 nt, Artificial Sequence
  Synthesized RNAi sequence
uucuuggugaaaugcagcuaca

SEQ ID NO: 11007 - RNA, 22 nt, Artificial Sequence
  Synthesized RNAi sequence
uugaguacaugacuguaaacua

SEQ ID NO: 11008 - RNA, 22 nt, Artificial Sequence
  Synthesized RNAi sequence
uugauguugaguacaugacugu

SEQ ID NO: 11009 - RNA, 22 nt, Artificial Sequence
  Synthesized RNAi sequence
uugggguccauuaucagacauu

SEQ ID NO: 11010 - RNA, 22 nt, Artificial Sequence
  Synthesized RNAi sequence
uuggugaaaugcagcuacaguu

SEQ ID NO: 11011 - RNA, 22 nt, Artificial Sequence
  Synthesized RNAi sequence
uuguaaaagguaaacaggaaac

SEQ ID NO: 11012 - RNA, 22 nt, Artificial Sequence
  Synthesized RNAi sequence
uuguucguuuagaugaaaucua

SEQ ID NO: 11013 - RNA, 22 nt, Artificial Sequence
  Synthesized RNAi sequence
uuuagaaccagccucauccacg

SEQ ID NO: 11014 - RNA, 22 nt, Artificial Sequence
  Synthesized RNAi sequence
uuuagaauagaagugaauagga

SEQ ID NO: 11015 - RNA, 22 nt, Artificial Sequence
  Synthesized RNAi sequence
uuuagaugaaaucuaaaacaac

SEQ ID NO: 11016 - RNA, 22 nt, Artificial Sequence
  Synthesized RNAi sequence
uuuagguuccuggcaauuaauu

SEQ ID NO: 11017 - RNA, 22 nt, Artificial Sequence
  Synthesized RNAi sequence
uuuaguuuguucguuuagauga

SEQ ID NO: 11018 - RNA, 22 nt, Artificial Sequence
  Synthesized RNAi sequence
uuucuagcuccuacucuaauau

SEQ ID NO: 11019 - RNA, 22 nt, Artificial Sequence
  Synthesized RNAi sequence
uuuguucguuuagaugaaaucu

SEQ ID NO: 11020 - RNA, 22 nt, Artificial Sequence
  Synthesized RNAi sequence
uuuuaguuuguucguuuagaug

SEQ ID NO: 11021 - RNA, 22 nt, Artificial Sequence
  Synthesized RNAi sequence
uuuucuagcuccuacucuaaua

SEQ ID NO: 11022 - RNA, 22 nt, Artificial Sequence
  Synthesized RNAi sequence
aaacacacaacagcaucgucag

SEQ ID NO: 11023 - RNA, 22 nt, Artificial Sequence
  Synthesized RNAi sequence
aaacagccggccccuaggauuc

SEQ ID NO: 11024 - RNA, 22 nt, Artificial Sequence
  Synthesized RNAi sequence
aaacaguuaacacaauuugggu

SEQ ID NO: 11025 - RNA, 22 nt, Artificial Sequence
  Synthesized RNAi sequence
aaacauuaaaguuugcacaaug

SEQ ID NO: 11026 - RNA, 22 nt, Artificial Sequence
  Synthesized RNAi sequence
aaaccagcuacuuuaucauugu

SEQ ID NO: 11027 - RNA, 22 nt, Artificial Sequence
  Synthesized RNAi sequence
aaaccagcugauuugucuaggu

SEQ ID NO: 11028 - RNA, 22 nt, Artificial Sequence
  Synthesized RNAi sequence
aaacccuuagacacagcaaagu

SEQ ID NO: 11029 - RNA, 22 nt, Artificial Sequence
  Synthesized RNAi sequence
aaacggugugacaagcuacaac

SEQ ID NO: 11030 - RNA, 22 nt, Artificial Sequence
  Synthesized RNAi sequence
aaacuaagucuagagcuaugua

SEQ ID NO: 11031 - RNA, 22 nt, Artificial Sequence
  Synthesized RNAi sequence
aaacucagguucccaauaccuu

SEQ ID NO: 11032 - RNA, 22 nt, Artificial Sequence
  Synthesized RNAi sequence
aaacucauucacaaagucugug

SEQ ID NO: 11033 - RNA, 22 nt, Artificial Sequence
  Synthesized RNAi sequence
aaacuuaaagaagucauguuua

SEQ ID NO: 11034 - RNA, 22 nt, Artificial Sequence
  Synthesized RNAi sequence
aaacuuguaggugggaacacug

SEQ ID NO: 11035 - RNA, 22 nt, Artificial Sequence
  Synthesized RNAi sequence
aaagaaacccuuagacacagca

SEQ ID NO: 11036 - RNA, 22 nt, Artificial Sequence
  Synthesized RNAi sequence
aaagaacacaagccccaacagc

SEQ ID NO: 11037 - RNA, 22 nt, Artificial Sequence
  Synthesized RNAi sequence
aaagaacugacuuaaaguucuu

SEQ ID NO: 11038 - RNA, 22 nt, Artificial Sequence
  Synthesized RNAi sequence
aaagaagaaguguuuuaauuca

SEQ ID NO: 11039 - RNA, 22 nt, Artificial Sequence
  Synthesized RNAi sequence
aaagaagucauguuuagcaaca

SEQ ID NO: 11040 - RNA, 22 nt, Artificial Sequence
  Synthesized RNAi sequence
aaagacacgaaccguucaauca

SEQ ID NO: 11041 - RNA, 22 nt, Artificial Sequence
  Synthesized RNAi sequence
aaagacaucagcauacuccuga

SEQ ID NO: 11042 - RNA, 22 nt, Artificial Sequence
  Synthesized RNAi sequence
aaagaguuuuaaccucucuucc

SEQ ID NO: 11043 - RNA, 22 nt, Artificial Sequence
  Synthesized RNAi sequence
aaagcaacauuguuaguaagug

SEQ ID NO: 11044 - RNA, 22 nt, Artificial Sequence
  Synthesized RNAi sequence
aaagcacguagugcguuuaucu

SEQ ID NO: 11045 - RNA, 22 nt, Artificial Sequence
  Synthesized RNAi sequence
aaagcauagacgaggucugcca

SEQ ID NO: 11046 - RNA, 22 nt, Artificial Sequence
  Synthesized RNAi sequence
aaagcccuggucaagguuaaua

SEQ ID NO: 11047 - RNA, 22 nt, Artificial Sequence
  Synthesized RNAi sequence
aaagcccuguauacgacaucag

SEQ ID NO: 11048 - RNA, 22 nt, Artificial Sequence
  Synthesized RNAi sequence
aaaguaagaaucaauuaaauug

SEQ ID NO: 11049 - RNA, 22 nt, Artificial Sequence
  Synthesized RNAi sequence
aaaguacuuaucaacaacuuca

SEQ ID NO: 11050 - RNA, 22 nt, Artificial Sequence
  Synthesized RNAi sequence
aaagucauagaagucuuuguua

SEQ ID NO: 11051 - RNA, 22 nt, Artificial Sequence
  Synthesized RNAi sequence
aaagucuagccuuaccccauuu

SEQ ID NO: 11052 - RNA, 22 nt, Artificial Sequence
  Synthesized RNAi sequence
aaagucugugucaacaucucua

SEQ ID NO: 11053 - RNA, 22 nt, Artificial Sequence
  Synthesized RNAi sequence
aaagucuguguuguaaauugcg

SEQ ID NO: 11054 - RNA, 22 nt, Artificial Sequence
  Synthesized RNAi sequence
aaagugcaucuugauccucaua

SEQ ID NO: 11055 - RNA, 22 nt, Artificial Sequence
  Synthesized RNAi sequence
aaagugcauuaacauuggccgu

SEQ ID NO: 11056 - RNA, 22 nt, Artificial Sequence
  Synthesized RNAi sequence
aaagugugucucuuaacuacaa

SEQ ID NO: 11057 - RNA, 22 nt, Artificial Sequence
  Synthesized RNAi sequence
aaaguucuuuaugcuagccacu

SEQ ID NO: 11058 - RNA, 22 nt, Artificial Sequence
  Synthesized RNAi sequence
aaauaacggucaaagaguuuua

SEQ ID NO: 11059 - RNA, 22 nt, Artificial Sequence
  Synthesized RNAi sequence
aaauaguaguugucugauauca

SEQ ID NO: 11060 - RNA, 22 nt, Artificial Sequence
  Synthesized RNAi sequence
aaauaugcguaaaacucauuca

SEQ ID NO: 11061 - RNA, 22 nt, Artificial Sequence
  Synthesized RNAi sequence
aaaucaccgaaaucauaccagu

SEQ ID NO: 11062 - RNA, 22 nt, Artificial Sequence
  Synthesized RNAi sequence
aaaucauaccaguuaccauuga

SEQ ID NO: 11063 - RNA, 22 nt, Artificial Sequence
  Synthesized RNAi sequence
aaaucccacuuaauguaaggcu

SEQ ID NO: 11064 - RNA, 22 nt, Artificial Sequence
  Synthesized RNAi sequence
aaaugccuuaaagcauagacga

SEQ ID NO: 11065 - RNA, 22 nt, Artificial Sequence
  Synthesized RNAi sequence
aaauggaaaaccagcugauuug

SEQ ID NO: 11066 - RNA, 22 nt, Artificial Sequence
  Synthesized RNAi sequence
aaauguuuacgcaaauaugcgu

SEQ ID NO: 11067 - RNA, 22 nt, Artificial Sequence
  Synthesized RNAi sequence
aaauuaccggguuugacaguuu

SEQ ID NO: 11068 - RNA, 22 nt, Artificial Sequence
  Synthesized RNAi sequence
aaauucaugagguccuuuagua

SEQ ID NO: 11069 - RNA, 22 nt, Artificial Sequence
  Synthesized RNAi sequence
aaauugcggacauacuuaucgg

SEQ ID NO: 11070 - RNA, 22 nt, Artificial Sequence
  Synthesized RNAi sequence
aaauuguuucuucauguuggua

SEQ ID NO: 11071 - RNA, 22 nt, Artificial Sequence
  Synthesized RNAi sequence
aacaaaucccacuuaauguaag

SEQ ID NO: 11072 - RNA, 22 nt, Artificial Sequence
  Synthesized RNAi sequence
aacaacuucaacuacaaauagu

SEQ ID NO: 11073 - RNA, 22 nt, Artificial Sequence
  Synthesized RNAi sequence
aacaagugaggccauaauucua

SEQ ID NO: 11074 - RNA, 22 nt, Artificial Sequence
  Synthesized RNAi sequence
aacaauaccagcauuucgcaug

SEQ ID NO: 11075 - RNA, 22 nt, Artificial Sequence
  Synthesized RNAi sequence
aacaaucaaaguacuuaucaac

SEQ ID NO: 11076 - RNA, 22 nt, Artificial Sequence
  Synthesized RNAi sequence
aacaaugaauaauaagaaucua

SEQ ID NO: 11077 - RNA, 22 nt, Artificial Sequence
  Synthesized RNAi sequence
aacacaagccccaacagccugu

SEQ ID NO: 11078 - RNA, 22 nt, Artificial Sequence
  Synthesized RNAi sequence
aacacaauuugggugguauguc

SEQ ID NO: 11079 - RNA, 22 nt, Artificial Sequence
  Synthesized RNAi sequence
aacacacaacagcaucgucaga

SEQ ID NO: 11080 - RNA, 22 nt, Artificial Sequence
  Synthesized RNAi sequence
aacaccuagcucucugaagugg

SEQ ID NO: 11081 - RNA, 22 nt, Artificial Sequence
  Synthesized RNAi sequence
aacacguuguauguuugcgagc

SEQ ID NO: 11082 - RNA, 22 nt, Artificial Sequence
  Synthesized RNAi sequence
aacacuguagagaauaaaacau

SEQ ID NO: 11083 - RNA, 22 nt, Artificial Sequence
  Synthesized RNAi sequence
aacagaacuuccuuccuuaaag

SEQ ID NO: 11084 - RNA, 22 nt, Artificial Sequence
  Synthesized RNAi sequence
aacagaauacaugucuaacaug

SEQ ID NO: 11085 - RNA, 22 nt, Artificial Sequence
  Synthesized RNAi sequence
aacagcaucgucagagaguauc

SEQ ID NO: 11086 - RNA, 22 nt, Artificial Sequence
  Synthesized RNAi sequence
aacagccggccccuaggauucu

SEQ ID NO: 11087 - RNA, 22 nt, Artificial Sequence
  Synthesized RNAi sequence
aacagcuggacaauccuuaagu

SEQ ID NO: 11088 - RNA, 22 nt, Artificial Sequence
  Synthesized RNAi sequence
aacaggaacuccacuaccuggc

SEQ ID NO: 11089 - RNA, 22 nt, Artificial Sequence
  Synthesized RNAi sequence
aacaguuaacacaauuugggug

SEQ ID NO: 11090 - RNA, 22 nt, Artificial Sequence
  Synthesized RNAi sequence
aacauauagugaaccgccacac

SEQ ID NO: 11091 - RNA, 22 nt, Artificial Sequence
  Synthesized RNAi sequence
aacaucucuauuucuauagaga

SEQ ID NO: 11092 - RNA, 22 nt, Artificial Sequence
  Synthesized RNAi sequence
aacaugugacucugcaguuaaa

SEQ ID NO: 11093 - RNA, 22 nt, Artificial Sequence
  Synthesized RNAi sequence
aacauguguccuguuaacucau

SEQ ID NO: 11094 - RNA, 22 nt, Artificial Sequence
  Synthesized RNAi sequence
aacauuaaaguuugcacaaugc

SEQ ID NO: 11095 - RNA, 22 nt, Artificial Sequence
  Synthesized RNAi sequence
aacauuguuaguaagugcagcu

SEQ ID NO: 11096 - RNA, 22 nt, Artificial Sequence
  Synthesized RNAi sequence
aaccagcuacuuuaucauugua

SEQ ID NO: 11097 - RNA, 22 nt, Artificial Sequence
  Synthesized RNAi sequence
aaccagcugauuugucuagguu

SEQ ID NO: 11098 - RNA, 22 nt, Artificial Sequence
  Synthesized RNAi sequence
aacccuuagacacagcaaaguc

SEQ ID NO: 11099 - RNA, 22 nt, Artificial Sequence
  Synthesized RNAi sequence
aaccgccacacaugaccauuuc

SEQ ID NO: 11100 - RNA, 22 nt, Artificial Sequence
  Synthesized RNAi sequence
aaccucucuuccgugaagucau

SEQ ID NO: 11101 - RNA, 22 nt, Artificial Sequence
  Synthesized RNAi sequence
aacgauaguagucauaaucgcu

SEQ ID NO: 11102 - RNA, 22 nt, Artificial Sequence
  Synthesized RNAi sequence
aacggucaaagaguuuuaaccu

SEQ ID NO: 11103 - RNA, 22 nt, Artificial Sequence
  Synthesized RNAi sequence
aacggugugacaagcuacaaca

SEQ ID NO: 11104 - RNA, 22 nt, Artificial Sequence
  Synthesized RNAi sequence
aacuaagucuagagcuauguaa

SEQ ID NO: 11105 - RNA, 22 nt, Artificial Sequence
  Synthesized RNAi sequence
aacuacaaauaguaguugucug

SEQ ID NO: 11106 - RNA, 22 nt, Artificial Sequence
  Synthesized RNAi sequence
aacuagcauuguauguugagag

SEQ ID NO: 11107 - RNA, 22 nt, Artificial Sequence
  Synthesized RNAi sequence
aacucagguucccaauaccuug

SEQ ID NO: 11108 - RNA, 22 nt, Artificial Sequence
  Synthesized RNAi sequence
aacucaucauguagcuuucuua

SEQ ID NO: 11109 - RNA, 22 nt, Artificial Sequence
  Synthesized RNAi sequence
aacucauucacaaagucugugu

SEQ ID NO: 11110 - RNA, 22 nt, Artificial Sequence
  Synthesized RNAi sequence
aacucauugaaucauaauaaag

SEQ ID NO: 11111 - RNA, 22 nt, Artificial Sequence
  Synthesized RNAi sequence
aacuccacuaccuggcgugguu

SEQ ID NO: 11112 - RNA, 22 nt, Artificial Sequence
  Synthesized RNAi sequence
aacugacuuaaaguucuuuaug

SEQ ID NO: 11113 - RNA, 22 nt, Artificial Sequence
  Synthesized RNAi sequence
aacuuaaagaagucauguuuag

SEQ ID NO: 11114 - RNA, 22 nt, Artificial Sequence
  Synthesized RNAi sequence
aacuucaacuacaaauaguagu

SEQ ID NO: 11115 - RNA, 22 nt, Artificial Sequence
  Synthesized RNAi sequence
aacuuccuuccuuaaagaaacc

SEQ ID NO: 11116 - RNA, 22 nt, Artificial Sequence
  Synthesized RNAi sequence
aacuuguaggugggaacacugu

SEQ ID NO: 11117 - RNA, 22 nt, Artificial Sequence
  Synthesized RNAi sequence
aagaaacccuuagacacagcaa

SEQ ID NO: 11118 - RNA, 22 nt, Artificial Sequence
  Synthesized RNAi sequence
aagaacaagugaggccauaauu

SEQ ID NO: 11119 - RNA, 22 nt, Artificial Sequence
  Synthesized RNAi sequence
aagaacacaagccccaacagcc

SEQ ID NO: 11120 - RNA, 22 nt, Artificial Sequence
  Synthesized RNAi sequence
aagaacugacuuaaaguucuuu

SEQ ID NO: 11121 - RNA, 22 nt, Artificial Sequence
  Synthesized RNAi sequence
aagaagaaguguuuuaauucaa

SEQ ID NO: 11122 - RNA, 22 nt, Artificial Sequence
  Synthesized RNAi sequence
aagaagucauguuuagcaacag

SEQ ID NO: 11123 - RNA, 22 nt, Artificial Sequence
  Synthesized RNAi sequence
aagaaguguuuuaauucaacag

SEQ ID NO: 11124 - RNA, 22 nt, Artificial Sequence
  Synthesized RNAi sequence
aagaaucaauuaaauugucauc

SEQ ID NO: 11125 - RNA, 22 nt, Artificial Sequence
  Synthesized RNAi sequence
aagaaucuacaacaggaacucc

SEQ ID NO: 11126 - RNA, 22 nt, Artificial Sequence
  Synthesized RNAi sequence
aagacacgaaccguucaaucau

SEQ ID NO: 11127 - RNA, 22 nt, Artificial Sequence
  Synthesized RNAi sequence
aagacaucagcauacuccugau

SEQ ID NO: 11128 - RNA, 22 nt, Artificial Sequence
  Synthesized RNAi sequence
aagacguugacgugauauaugu

SEQ ID NO: 11129 - RNA, 22 nt, Artificial Sequence
  Synthesized RNAi sequence
aagacuguaugcgguguguaca

SEQ ID NO: 11130 - RNA, 22 nt, Artificial Sequence
  Synthesized RNAi sequence
aagaguuuuaaccucucuuccg

SEQ ID NO: 11131 - RNA, 22 nt, Artificial Sequence
  Synthesized RNAi sequence
aagauucauuugaguuauagua

SEQ ID NO: 11132 - RNA, 22 nt, Artificial Sequence
  Synthesized RNAi sequence
aagcaacauuguuaguaagugc

SEQ ID NO: 11133 - RNA, 22 nt, Artificial Sequence
  Synthesized RNAi sequence
aagcacguagugcguuuaucua

SEQ ID NO: 11134 - RNA, 22 nt, Artificial Sequence
  Synthesized RNAi sequence
aagcagcgugcauagcaggguc

SEQ ID NO: 11135 - RNA, 22 nt, Artificial Sequence
  Synthesized RNAi sequence
aagcaguuguggcaucuccuga

SEQ ID NO: 11136 - RNA, 22 nt, Artificial Sequence
  Synthesized RNAi sequence
aagcauaacagaauacaugucu

SEQ ID NO: 11137 - RNA, 22 nt, Artificial Sequence
  Synthesized RNAi sequence
aagcauagacgaggucugccau

SEQ ID NO: 11138 - RNA, 22 nt, Artificial Sequence
  Synthesized RNAi sequence
aagcaucuauagcuaaagacac

SEQ ID NO: 11139 - RNA, 22 nt, Artificial Sequence
  Synthesized RNAi sequence
aagcauguuaggcauggcucua

SEQ ID NO: 11140 - RNA, 22 nt, Artificial Sequence
  Synthesized RNAi sequence
aagccccaacagccuguaagac

SEQ ID NO: 11141 - RNA, 22 nt, Artificial Sequence
  Synthesized RNAi sequence
aagcccuggucaagguuaauau

SEQ ID NO: 11142 - RNA, 22 nt, Artificial Sequence
  Synthesized RNAi sequence
aagcccuguauacgacaucagu

SEQ ID NO: 11143 - RNA, 22 nt, Artificial Sequence
  Synthesized RNAi sequence
aagcuacaacacguuguauguu

SEQ ID NO: 11144 - RNA, 22 nt, Artificial Sequence
  Synthesized RNAi sequence
aaggaagguacacauaaucauc

SEQ ID NO: 11145 - RNA, 22 nt, Artificial Sequence
  Synthesized RNAi sequence
aaggcuuuguuaagucaguguc

SEQ ID NO: 11146 - RNA, 22 nt, Artificial Sequence
  Synthesized RNAi sequence
aagguacacauaaucaucaccc

SEQ ID NO: 11147 - RNA, 22 nt, Artificial Sequence
  Synthesized RNAi sequence
aaggucagucucaguccaacau

SEQ ID NO: 11148 - RNA, 22 nt, Artificial Sequence
  Synthesized RNAi sequence
aaggugaggguuuucuacauca

SEQ ID NO: 11149 - RNA, 22 nt, Artificial Sequence
  Synthesized RNAi sequence
aagguuaauauaggcauuaaca

SEQ ID NO: 11150 - RNA, 22 nt, Artificial Sequence
  Synthesized RNAi sequence
aaguaagaaucaauuaaauugu

SEQ ID NO: 11151 - RNA, 22 nt, Artificial Sequence
  Synthesized RNAi sequence
aaguaauuccuuaaaacuaagu

SEQ ID NO: 11152 - RNA, 22 nt, Artificial Sequence
  Synthesized RNAi sequence
aaguacaaaugaaagacaucag

SEQ ID NO: 11153 - RNA, 22 nt, Artificial Sequence
  Synthesized RNAi sequence
aagucagugucaacaugugacu

SEQ ID NO: 11154 - RNA, 22 nt, Artificial Sequence
  Synthesized RNAi sequence
aagucauagaagucuuuguuaa

SEQ ID NO: 11155 - RNA, 22 nt, Artificial Sequence
  Synthesized RNAi sequence
aagucauauuuuaacaaauccc

SEQ ID NO: 11156 - RNA, 22 nt, Artificial Sequence
  Synthesized RNAi sequence
aagucauguuuagcaacagcug

SEQ ID NO: 11157 - RNA, 22 nt, Artificial Sequence
  Synthesized RNAi sequence
aagucuagccuuaccccauuua

SEQ ID NO: 11158 - RNA, 22 nt, Artificial Sequence
  Synthesized RNAi sequence
aagucugugucaacaucucuau

SEQ ID NO: 11159 - RNA, 22 nt, Artificial Sequence
  Synthesized RNAi sequence
aagucuguguuguaaauugcgg

SEQ ID NO: 11160 - RNA, 22 nt, Artificial Sequence
  Synthesized RNAi sequence
aagucuuuguuaaaauuaccgg

SEQ ID NO: 11161 - RNA, 22 nt, Artificial Sequence
  Synthesized RNAi sequence
aagugaggccauaauucuaagc

SEQ ID NO: 11162 - RNA, 22 nt, Artificial Sequence
  Synthesized RNAi sequence
aagugcagcuacugaaaagcac

SEQ ID NO: 11163 - RNA, 22 nt, Artificial Sequence
  Synthesized RNAi sequence
aagugcaucuugauccucauaa

SEQ ID NO: 11164 - RNA, 22 nt, Artificial Sequence
  Synthesized RNAi sequence
aagugcauuaacauuggccgug

SEQ ID NO: 11165 - RNA, 22 nt, Artificial Sequence
  Synthesized RNAi sequence
aagugcuauugaaacacacaac

SEQ ID NO: 11166 - RNA, 22 nt, Artificial Sequence
  Synthesized RNAi sequence
aaguggguaagcaucuauagcu

SEQ ID NO: 11167 - RNA, 22 nt, Artificial Sequence
  Synthesized RNAi sequence
aagugguauccaguugaaacua

SEQ ID NO: 11168 - RNA, 22 nt, Artificial Sequence
  Synthesized RNAi sequence
aagugugucucuuaacuacaaa

SEQ ID NO: 11169 - RNA, 22 nt, Artificial Sequence
  Synthesized RNAi sequence
aaguguuuuaauucaacagaac

SEQ ID NO: 11170 - RNA, 22 nt, Artificial Sequence
  Synthesized RNAi sequence
aaguucuuuaugcuagccacua

SEQ ID NO: 11171 - RNA, 22 nt, Artificial Sequence
  Synthesized RNAi sequence
aaguuuacauccugauuaugua

SEQ ID NO: 11172 - RNA, 22 nt, Artificial Sequence
  Synthesized RNAi sequence
aaguuugcacaaugcagaaugc

SEQ ID NO: 11173 - RNA, 22 nt, Artificial Sequence
  Synthesized RNAi sequence
aauaaaacauuaaaguuugcac

SEQ ID NO: 11174 - RNA, 22 nt, Artificial Sequence
  Synthesized RNAi sequence
aauaaagaacugacuuaaaguu

SEQ ID NO: 11175 - RNA, 22 nt, Artificial Sequence
  Synthesized RNAi sequence
aauaaagucuagccuuacccca

SEQ ID NO: 11176 - RNA, 22 nt, Artificial Sequence
  Synthesized RNAi sequence
aauaacggucaaagaguuuuaa

SEQ ID NO: 11177 - RNA, 22 nt, Artificial Sequence
  Synthesized RNAi sequence
aauaagaaucuacaacaggaac

SEQ ID NO: 11178 - RNA, 22 nt, Artificial Sequence
  Synthesized RNAi sequence
aauaauaagaaucuacaacagg

SEQ ID NO: 11179 - RNA, 22 nt, Artificial Sequence
  Synthesized RNAi sequence
aauacagccaccaucguaacaa

SEQ ID NO: 11180 - RNA, 22 nt, Artificial Sequence
  Synthesized RNAi sequence
aauacaugucuaacaugugucc

SEQ ID NO: 11181 - RNA, 22 nt, Artificial Sequence
  Synthesized RNAi sequence
aauaccagcauuucgcauggca

SEQ ID NO: 11182 - RNA, 22 nt, Artificial Sequence
  Synthesized RNAi sequence
aauaccuugaaguguuaucauu

SEQ ID NO: 11183 - RNA, 22 nt, Artificial Sequence
  Synthesized RNAi sequence
aauagauuaccagaagcagcgu

SEQ ID NO: 11184 - RNA, 22 nt, Artificial Sequence
  Synthesized RNAi sequence
aauaguaguugucugauaucac

SEQ ID NO: 11185 - RNA, 22 nt, Artificial Sequence
  Synthesized RNAi sequence
aauauaggcauuaacaaugaau

SEQ ID NO: 11186 - RNA, 22 nt, Artificial Sequence
  Synthesized RNAi sequence
aauaugcguaaaacucauucac

SEQ ID NO: 11187 - RNA, 22 nt, Artificial Sequence
  Synthesized RNAi sequence
aauauuuaaaauaacggucaaa

SEQ ID NO: 11188 - RNA, 22 nt, Artificial Sequence
  Synthesized RNAi sequence
aaucaaaguacuuaucaacaac

SEQ ID NO: 11189 - RNA, 22 nt, Artificial Sequence
  Synthesized RNAi sequence
aaucaauuaaauugucaucuuc

SEQ ID NO: 11190 - RNA, 22 nt, Artificial Sequence
  Synthesized RNAi sequence
aaucaccgaaaucauaccaguu

SEQ ID NO: 11191 - RNA, 22 nt, Artificial Sequence
  Synthesized RNAi sequence
aaucauaauaaagucuagccuu

SEQ ID NO: 11192 - RNA, 22 nt, Artificial Sequence
  Synthesized RNAi sequence
aaucauaccaguuaccauugag

SEQ ID NO: 11193 - RNA, 22 nt, Artificial Sequence
  Synthesized RNAi sequence
aaucaucacccuguuuaacuag

SEQ ID NO: 11194 - RNA, 22 nt, Artificial Sequence
  Synthesized RNAi sequence
aaucccaacccauaaggugagg

SEQ ID NO: 11195 - RNA, 22 nt, Artificial Sequence
  Synthesized RNAi sequence
aaucccacuuaauguaaggcuu

SEQ ID NO: 11196 - RNA, 22 nt, Artificial Sequence
  Synthesized RNAi sequence
aaucgcugauagcagcauuacc

SEQ ID NO: 11197 - RNA, 22 nt, Artificial Sequence
  Synthesized RNAi sequence
aaucuacaacaggaacuccacu

SEQ ID NO: 11198 - RNA, 22 nt, Artificial Sequence
  Synthesized RNAi sequence
aaucuauagaaacggugugaca

SEQ ID NO: 11199 - RNA, 22 nt, Artificial Sequence
  Synthesized RNAi sequence
aaugaaagacaucagcauacuc

SEQ ID NO: 11200 - RNA, 22 nt, Artificial Sequence
  Synthesized RNAi sequence
aaugaauaauaagaaucuacaa

SEQ ID NO: 11201 - RNA, 22 nt, Artificial Sequence
  Synthesized RNAi sequence
aaugcagaaugcaucugucauc

SEQ ID NO: 11202 - RNA, 22 nt, Artificial Sequence
  Synthesized RNAi sequence
aaugcaucugucauccaaacag

SEQ ID NO: 11203 - RNA, 22 nt, Artificial Sequence
  Synthesized RNAi sequence
aaugccuuaaagcauagacgag

SEQ ID NO: 11204 - RNA, 22 nt, Artificial Sequence
  Synthesized RNAi sequence
aauggaaaaccagcugauuugu

SEQ ID NO: 11205 - RNA, 22 nt, Artificial Sequence
  Synthesized RNAi sequence
aauggcauacuuaagauucauu

SEQ ID NO: 11206 - RNA, 22 nt, Artificial Sequence
  Synthesized RNAi sequence
aauguaaggcuuuguuaaguca

SEQ ID NO: 11207 - RNA, 22 nt, Artificial Sequence
  Synthesized RNAi sequence
aaugucaguacaccaacaauac

SEQ ID NO: 11208 - RNA, 22 nt, Artificial Sequence
  Synthesized RNAi sequence
aaugugucacaauuaccuucau

SEQ ID NO: 11209 - RNA, 22 nt, Artificial Sequence
  Synthesized RNAi sequence
aauguuuacgcaaauaugcgua

SEQ ID NO: 11210 - RNA, 22 nt, Artificial Sequence
  Synthesized RNAi sequence
aauuaaauugucaucuucgucc

SEQ ID NO: 11211 - RNA, 22 nt, Artificial Sequence
  Synthesized RNAi sequence
aauuaccggguuugacaguuug

SEQ ID NO: 11212 - RNA, 22 nt, Artificial Sequence
  Synthesized RNAi sequence
aauuaccuucaucaaaaugccu

SEQ ID NO: 11213 - RNA, 22 nt, Artificial Sequence
  Synthesized RNAi sequence
aauuacuacaguagcuccucua

SEQ ID NO: 11214 - RNA, 22 nt, Artificial Sequence
  Synthesized RNAi sequence
aauuauaaauuguuucuucaug

SEQ ID NO: 11215 - RNA, 22 nt, Artificial Sequence
  Synthesized RNAi sequence
aauucaacagaacuuccuuccu

SEQ ID NO: 11216 - RNA, 22 nt, Artificial Sequence
  Synthesized RNAi sequence
aauucaugagguccuuuaguaa

SEQ ID NO: 11217 - RNA, 22 nt, Artificial Sequence
  Synthesized RNAi sequence
aauuccuuaaaacuaagucuag

SEQ ID NO: 11218 - RNA, 22 nt, Artificial Sequence
  Synthesized RNAi sequence
aauucuaagcauguuaggcaug

SEQ ID NO: 11219 - RNA, 22 nt, Artificial Sequence
  Synthesized RNAi sequence
aauugcaaagaacacaagcccc

SEQ ID NO: 11220 - RNA, 22 nt, Artificial Sequence
  Synthesized RNAi sequence
aauugcggacauacuuaucggc

SEQ ID NO: 11221 - RNA, 22 nt, Artificial Sequence
  Synthesized RNAi sequence
aauuguuucuucauguugguag

SEQ ID NO: 11222 - RNA, 22 nt, Artificial Sequence
  Synthesized RNAi sequence
aauuugcuuguuccaauuacua

SEQ ID NO: 11223 - RNA, 22 nt, Artificial Sequence
  Synthesized RNAi sequence
aauuugggugguaugucugauc

SEQ ID NO: 11224 - RNA, 22 nt, Artificial Sequence
  Synthesized RNAi sequence
aauuuuguuaccaucaguagau

SEQ ID NO: 11225 - RNA, 22 nt, Artificial Sequence
  Synthesized RNAi sequence
acaaaacagccggccccuagga

SEQ ID NO: 11226 - RNA, 22 nt, Artificial Sequence
  Synthesized RNAi sequence
acaaaguaagaaucaauuaaau

SEQ ID NO: 11227 - RNA, 22 nt, Artificial Sequence
  Synthesized RNAi sequence
acaaagucugugucaacaucuc

SEQ ID NO: 11228 - RNA, 22 nt, Artificial Sequence
  Synthesized RNAi sequence
acaaaucccacuuaauguaagg

SEQ ID NO: 11229 - RNA, 22 nt, Artificial Sequence
  Synthesized RNAi sequence
acaaaugaaagacaucagcaua

SEQ ID NO: 11230 - RNA, 22 nt, Artificial Sequence
  Synthesized RNAi sequence
acaacaccuagcucucugaagu

SEQ ID NO: 11231 - RNA, 22 nt, Artificial Sequence
  Synthesized RNAi sequence
acaacacguuguauguuugcga

SEQ ID NO: 11232 - RNA, 22 nt, Artificial Sequence
  Synthesized RNAi sequence
acaacagcaucgucagagagua

SEQ ID NO: 11233 - RNA, 22 nt, Artificial Sequence
  Synthesized RNAi sequence
acaacaggaacuccacuaccug

SEQ ID NO: 11234 - RNA, 22 nt, Artificial Sequence
  Synthesized RNAi sequence
acaacuucaacuacaaauagua

SEQ ID NO: 11235 - RNA, 22 nt, Artificial Sequence
  Synthesized RNAi sequence
acaagccccaacagccuguaag

SEQ ID NO: 11236 - RNA, 22 nt, Artificial Sequence
  Synthesized RNAi sequence
acaagcuacaacacguuguaug

SEQ ID NO: 11237 - RNA, 22 nt, Artificial Sequence
  Synthesized RNAi sequence
acaaguaauuccuuaaaacuaa

SEQ ID NO: 11238 - RNA, 22 nt, Artificial Sequence
  Synthesized RNAi sequence
acaagugaggccauaauucuaa

SEQ ID NO: 11239 - RNA, 22 nt, Artificial Sequence
  Synthesized RNAi sequence
acaauaccagcauuucgcaugg

SEQ ID NO: 11240 - RNA, 22 nt, Artificial Sequence
  Synthesized RNAi sequence
acaaucaaaguacuuaucaaca

SEQ ID NO: 11241 - RNA, 22 nt, Artificial Sequence
  Synthesized RNAi sequence
acaauccuuaaguaaauuauaa

SEQ ID NO: 11242 - RNA, 22 nt, Artificial Sequence
  Synthesized RNAi sequence
acaaugaauaauaagaaucuac

SEQ ID NO: 11243 - RNA, 22 nt, Artificial Sequence
  Synthesized RNAi sequence
acaaugcagaaugcaucuguca

SEQ ID NO: 11244 - RNA, 22 nt, Artificial Sequence
  Synthesized RNAi sequence
acaauuugggugguaugucuga

SEQ ID NO: 11245 - RNA, 22 nt, Artificial Sequence
  Synthesized RNAi sequence
acacaacagcaucgucagagag

SEQ ID NO: 11246 - RNA, 22 nt, Artificial Sequence
  Synthesized RNAi sequence
acacaagccccaacagccugua

SEQ ID NO: 11247 - RNA, 22 nt, Artificial Sequence
  Synthesized RNAi sequence
acacaaguaauuccuuaaaacu

SEQ ID NO: 11248 - RNA, 22 nt, Artificial Sequence
  Synthesized RNAi sequence
acacaauuugggugguaugucu

SEQ ID NO: 11249 - RNA, 22 nt, Artificial Sequence
  Synthesized RNAi sequence
acacacaacagcaucgucagag

SEQ ID NO: 11250 - RNA, 22 nt, Artificial Sequence
  Synthesized RNAi sequence
acacagcaaagucauagaaguc

SEQ ID NO: 11251 - RNA, 22 nt, Artificial Sequence
  Synthesized RNAi sequence
acacauaaucaucacccuguuu

SEQ ID NO: 11252 - RNA, 22 nt, Artificial Sequence
  Synthesized RNAi sequence
acacauuguugguagauuauaa

SEQ ID NO: 11253 - RNA, 22 nt, Artificial Sequence
  Synthesized RNAi sequence
acaccaacaauaccagcauuuc

SEQ ID NO: 11254 - RNA, 22 nt, Artificial Sequence
  Synthesized RNAi sequence
acaccuagcucucugaaguggu

SEQ ID NO: 11255 - RNA, 22 nt, Artificial Sequence
  Synthesized RNAi sequence
acacgaaccguucaaucauaag

SEQ ID NO: 11256 - RNA, 22 nt, Artificial Sequence
  Synthesized RNAi sequence
acacguuguauguuugcgagca

SEQ ID NO: 11257 - RNA, 22 nt, Artificial Sequence
  Synthesized RNAi sequence
acacucauaaagucuguguugu

SEQ ID NO: 11258 - RNA, 22 nt, Artificial Sequence
  Synthesized RNAi sequence
acacucauuagcuaaucuauag

SEQ ID NO: 11259 - RNA, 22 nt, Artificial Sequence
  Synthesized RNAi sequence
acacuguagagaauaaaacauu

SEQ ID NO: 11260 - RNA, 22 nt, Artificial Sequence
  Synthesized RNAi sequence
acagaacuuccuuccuuaaaga

SEQ ID NO: 11261 - RNA, 22 nt, Artificial Sequence
  Synthesized RNAi sequence
acagauagagacaccagcuacg

SEQ ID NO: 11262 - RNA, 22 nt, Artificial Sequence
  Synthesized RNAi sequence
acagcaucgucagagaguauca

SEQ ID NO: 11263 - RNA, 22 nt, Artificial Sequence
  Synthesized RNAi sequence
acagccaccaucguaacaauca

SEQ ID NO: 11264 - RNA, 22 nt, Artificial Sequence
  Synthesized RNAi sequence
acagccggccccuaggauucuu

SEQ ID NO: 11265 - RNA, 22 nt, Artificial Sequence
  Synthesized RNAi sequence
acagcuggacaauccuuaagua

SEQ ID NO: 11266 - RNA, 22 nt, Artificial Sequence
  Synthesized RNAi sequence
acaggaacuccacuaccuggcg

SEQ ID NO: 11267 - RNA, 22 nt, Artificial Sequence
  Synthesized RNAi sequence
acaguagcuccucuaguggcgg

SEQ ID NO: 11268 - RNA, 22 nt, Artificial Sequence
  Synthesized RNAi sequence
acaguuaacacaauuugggugg

SEQ ID NO: 11269 - RNA, 22 nt, Artificial Sequence
  Synthesized RNAi sequence
acauaaucaucacccuguuuaa

SEQ ID NO: 11270 - RNA, 22 nt, Artificial Sequence
  Synthesized RNAi sequence
acauacuuaucggcaauuuugu

SEQ ID NO: 11271 - RNA, 22 nt, Artificial Sequence
  Synthesized RNAi sequence
acauagccucauaaaacucagg

SEQ ID NO: 11272 - RNA, 22 nt, Artificial Sequence
  Synthesized RNAi sequence
acauauagugaaccgccacaca

SEQ ID NO: 11273 - RNA, 22 nt, Artificial Sequence
  Synthesized RNAi sequence
acaucagcauacuccugauuag

SEQ ID NO: 11274 - RNA, 22 nt, Artificial Sequence
  Synthesized RNAi sequence
acaucaguacuagugccugugc

SEQ ID NO: 11275 - RNA, 22 nt, Artificial Sequence
  Synthesized RNAi sequence
acauccugauuauguacaacac

SEQ ID NO: 11276 - RNA, 22 nt, Artificial Sequence
  Synthesized RNAi sequence
acaucucuauuucuauagagac

SEQ ID NO: 11277 - RNA, 22 nt, Artificial Sequence
  Synthesized RNAi sequence
acaugaccauuucacucaauac

SEQ ID NO: 11278 - RNA, 22 nt, Artificial Sequence
  Synthesized RNAi sequence
acaugucuaacauguguccugu

SEQ ID NO: 11279 - RNA, 22 nt, Artificial Sequence
  Synthesized RNAi sequence
acaugugacucugcaguuaaag

SEQ ID NO: 11280 - RNA, 22 nt, Artificial Sequence
  Synthesized RNAi sequence
acauguguccuguuaacucauc

SEQ ID NO: 11281 - RNA, 22 nt, Artificial Sequence
  Synthesized RNAi sequence
acauuaaaguuugcacaaugca

SEQ ID NO: 11282 - RNA, 22 nt, Artificial Sequence
  Synthesized RNAi sequence
acauuacguuuuguauaugcga

SEQ ID NO: 11283 - RNA, 22 nt, Artificial Sequence
  Synthesized RNAi sequence
acauuguuaguaagugcagcua

SEQ ID NO: 11284 - RNA, 22 nt, Artificial Sequence
  Synthesized RNAi sequence
acauuguugguagauuauaacg

SEQ ID NO: 11285 - RNA, 22 nt, Artificial Sequence
  Synthesized RNAi sequence
acauuuaggauaaucccaaccc

SEQ ID NO: 11286 - RNA, 22 nt, Artificial Sequence
  Synthesized RNAi sequence
accaacaauaccagcauuucgc

SEQ ID NO: 11287 - RNA, 22 nt, Artificial Sequence
  Synthesized RNAi sequence
accaccauagaauuugcuuguu

SEQ ID NO: 11288 - RNA, 22 nt, Artificial Sequence
  Synthesized RNAi sequence
accagaagcagcgugcauagca

SEQ ID NO: 11289 - RNA, 22 nt, Artificial Sequence
  Synthesized RNAi sequence
accagcauuucgcauggcauca

SEQ ID NO: 11290 - RNA, 22 nt, Artificial Sequence
  Synthesized RNAi sequence
accagcuacggugcgagcucua

SEQ ID NO: 11291 - RNA, 22 nt, Artificial Sequence
  Synthesized RNAi sequence
accagcuacuuuaucauuguag

SEQ ID NO: 11292 - RNA, 22 nt, Artificial Sequence
  Synthesized RNAi sequence
accagcugauuugucuagguug

SEQ ID NO: 11293 - RNA, 22 nt, Artificial Sequence
  Synthesized RNAi sequence
accaguuaccauugagaucuug

SEQ ID NO: 11294 - RNA, 22 nt, Artificial Sequence
  Synthesized RNAi sequence
accauagaauuugcuuguucca

SEQ ID NO: 11295 - RNA, 22 nt, Artificial Sequence
  Synthesized RNAi sequence
accaucaguagauaaaagugca

SEQ ID NO: 11296 - RNA, 22 nt, Artificial Sequence
  Synthesized RNAi sequence
accauccugagcaaagaagaag

SEQ ID NO: 11297 - RNA, 22 nt, Artificial Sequence
  Synthesized RNAi sequence
accaucguaacaaucaaaguac

SEQ ID NO: 11298 - RNA, 22 nt, Artificial Sequence
  Synthesized RNAi sequence
accaugucaccgucuauucuaa

SEQ ID NO: 11299 - RNA, 22 nt, Artificial Sequence
  Synthesized RNAi sequence
accauugagaucuugauuaucu

SEQ ID NO: 11300 - RNA, 22 nt, Artificial Sequence
  Synthesized RNAi sequence
accauuucacucaauacuugag

SEQ ID NO: 11301 - RNA, 22 nt, Artificial Sequence
  Synthesized RNAi sequence
acccauaaggugaggguuuucu

SEQ ID NO: 11302 - RNA, 22 nt, Artificial Sequence
  Synthesized RNAi sequence
accccauuuauuaaauggaaaa

SEQ ID NO: 11303 - RNA, 22 nt, Artificial Sequence
  Synthesized RNAi sequence
acccuuagacacagcaaaguca

SEQ ID NO: 11304 - RNA, 22 nt, Artificial Sequence
  Synthesized RNAi sequence
accgaaaucauaccaguuacca

SEQ ID NO: 11305 - RNA, 22 nt, Artificial Sequence
  Synthesized RNAi sequence
accgccacacaugaccauuuca

SEQ ID NO: 11306 - RNA, 22 nt, Artificial Sequence
  Synthesized RNAi sequence
accggguuugacaguuugaaaa

SEQ ID NO: 11307 - RNA, 22 nt, Artificial Sequence
  Synthesized RNAi sequence
accgucuauucuaaacuuaaag

SEQ ID NO: 11308 - RNA, 22 nt, Artificial Sequence
  Synthesized RNAi sequence
accuagcucucugaagugguau

SEQ ID NO: 11309 - RNA, 22 nt, Artificial Sequence
  Synthesized RNAi sequence
accucucuuccgugaagucaua

SEQ ID NO: 11310 - RNA, 22 nt, Artificial Sequence
  Synthesized RNAi sequence
accuggcgugguuuguaugaaa

SEQ ID NO: 11311 - RNA, 22 nt, Artificial Sequence
  Synthesized RNAi sequence
accugguuuaacauauagugaa

SEQ ID NO: 11312 - RNA, 22 nt, Artificial Sequence
  Synthesized RNAi sequence
accuucaucaaaaugccuuaaa

SEQ ID NO: 11313 - RNA, 22 nt, Artificial Sequence
  Synthesized RNAi sequence
accuugaaguguuaucauuagu

SEQ ID NO: 11314 - RNA, 22 nt, Artificial Sequence
  Synthesized RNAi sequence
accuugagaugcauaagugcua

SEQ ID NO: 11315 - RNA, 22 nt, Artificial Sequence
  Synthesized RNAi sequence
acgacaucaguacuagugccug

SEQ ID NO: 11316 - RNA, 22 nt, Artificial Sequence
  Synthesized RNAi sequence
acgaggucugccauuguguauu

SEQ ID NO: 11317 - RNA, 22 nt, Artificial Sequence
  Synthesized RNAi sequence
acgauaguagucauaaucgcug

SEQ ID NO: 11318 - RNA, 22 nt, Artificial Sequence
  Synthesized RNAi sequence
acgaugacuugguuagcauuaa

SEQ ID NO: 11319 - RNA, 22 nt, Artificial Sequence
  Synthesized RNAi sequence
acgcaaauaugcguaaaacuca

SEQ ID NO: 11320 - RNA, 22 nt, Artificial Sequence
  Synthesized RNAi sequence
acggucaaagaguuuuaaccuc

SEQ ID NO: 11321 - RNA, 22 nt, Artificial Sequence
  Synthesized RNAi sequence
acggugcgagcucuauucuuug

SEQ ID NO: 11322 - RNA, 22 nt, Artificial Sequence
  Synthesized RNAi sequence
acggugugacaagcuacaacac

SEQ ID NO: 11323 - RNA, 22 nt, Artificial Sequence
  Synthesized RNAi sequence
acguagugcguuuaucuaguaa

SEQ ID NO: 11324 - RNA, 22 nt, Artificial Sequence
  Synthesized RNAi sequence
acgugauauaugugguaccaug

SEQ ID NO: 11325 - RNA, 22 nt, Artificial Sequence
  Synthesized RNAi sequence
acguugacgugauauauguggu

SEQ ID NO: 11326 - RNA, 22 nt, Artificial Sequence
  Synthesized RNAi sequence
acguuguauguuugcgagcaag

SEQ ID NO: 11327 - RNA, 22 nt, Artificial Sequence
  Synthesized RNAi sequence
acguuuuguauaugcgaaaagu

SEQ ID NO: 11328 - RNA, 22 nt, Artificial Sequence
  Synthesized RNAi sequence
acuaagucuagagcuauguaag

SEQ ID NO: 11329 - RNA, 22 nt, Artificial Sequence
  Synthesized RNAi sequence
acuaauggcauacuuaagauuc

SEQ ID NO: 11330 - RNA, 22 nt, Artificial Sequence
  Synthesized RNAi sequence
acuacaaauaguaguugucuga

SEQ ID NO: 11331 - RNA, 22 nt, Artificial Sequence
  Synthesized RNAi sequence
acuacagauagagacaccagcu

SEQ ID NO: 11332 - RNA, 22 nt, Artificial Sequence
  Synthesized RNAi sequence
acuacaguagcuccucuagugg

SEQ ID NO: 11333 - RNA, 22 nt, Artificial Sequence
  Synthesized RNAi sequence
acuaccuggcgugguuuguaug

SEQ ID NO: 11334 - RNA, 22 nt, Artificial Sequence
  Synthesized RNAi sequence
acuagaccuugagaugcauaag

SEQ ID NO: 11335 - RNA, 22 nt, Artificial Sequence
  Synthesized RNAi sequence
acuagcauuguauguugagagc

SEQ ID NO: 11336 - RNA, 22 nt, Artificial Sequence
  Synthesized RNAi sequence
acucaauacuugagcacacuca

SEQ ID NO: 11337 - RNA, 22 nt, Artificial Sequence
  Synthesized RNAi sequence
acucagguucccaauaccuuga

SEQ ID NO: 11338 - RNA, 22 nt, Artificial Sequence
  Synthesized RNAi sequence
acucauaaagucuguguuguaa

SEQ ID NO: 11339 - RNA, 22 nt, Artificial Sequence
  Synthesized RNAi sequence
acucaucauguagcuuucuuau

SEQ ID NO: 11340 - RNA, 22 nt, Artificial Sequence
  Synthesized RNAi sequence
acucauuagcuaaucuauagaa

SEQ ID NO: 11341 - RNA, 22 nt, Artificial Sequence
  Synthesized RNAi sequence
acucauucacaaagucuguguc

SEQ ID NO: 11342 - RNA, 22 nt, Artificial Sequence
  Synthesized RNAi sequence
acucauugaaucauaauaaagu

SEQ ID NO: 11343 - RNA, 22 nt, Artificial Sequence
  Synthesized RNAi sequence
acuccacuaccuggcgugguuu

SEQ ID NO: 11344 - RNA, 22 nt, Artificial Sequence
  Synthesized RNAi sequence
acuccugauuaggauguuuagu

SEQ ID NO: 11345 - RNA, 22 nt, Artificial Sequence
  Synthesized RNAi sequence
acucugcaguuaaagcccuggu

SEQ ID NO: 11346 - RNA, 22 nt, Artificial Sequence
  Synthesized RNAi sequence
acugaaaagcacguagugcguu

SEQ ID NO: 11347 - RNA, 22 nt, Artificial Sequence
  Synthesized RNAi sequence
acugacuuaaaguucuuuaugc

SEQ ID NO: 11348 - RNA, 22 nt, Artificial Sequence
  Synthesized RNAi sequence
acuguagagaauaaaacauuaa

SEQ ID NO: 11349 - RNA, 22 nt, Artificial Sequence
  Synthesized RNAi sequence
acuguaugcgguguguacauag

SEQ ID NO: 11350 - RNA, 22 nt, Artificial Sequence
  Synthesized RNAi sequence
acuuaaagaagucauguuuagc

SEQ ID NO: 11351 - RNA, 22 nt, Artificial Sequence
  Synthesized RNAi sequence
acuuaaaguucuuuaugcuagc

SEQ ID NO: 11352 - RNA, 22 nt, Artificial Sequence
  Synthesized RNAi sequence
acuuaagauucauuugaguuau

SEQ ID NO: 11353 - RNA, 22 nt, Artificial Sequence
  Synthesized RNAi sequence
acuuaauguaaggcuuuguuaa

SEQ ID NO: 11354 - RNA, 22 nt, Artificial Sequence
  Synthesized RNAi sequence
acuuaucaacaacuucaacuac

SEQ ID NO: 11355 - RNA, 22 nt, Artificial Sequence
  Synthesized RNAi sequence
acuucaacuacaaauaguaguu

SEQ ID NO: 11356 - RNA, 22 nt, Artificial Sequence
  Synthesized RNAi sequence
acuuccuuccuuaaagaaaccc

SEQ ID NO: 11357 - RNA, 22 nt, Artificial Sequence
  Synthesized RNAi sequence
acuugagcacacucauuagcua

SEQ ID NO: 11358 - RNA, 22 nt, Artificial Sequence
  Synthesized RNAi sequence
acuugguuagcauuaauacagc

SEQ ID NO: 11359 - RNA, 22 nt, Artificial Sequence
  Synthesized RNAi sequence
acuuguaggugggaacacugua

SEQ ID NO: 11360 - RNA, 22 nt, Artificial Sequence
  Synthesized RNAi sequence
acuuuaucauuguagaugucaa

SEQ ID NO: 11361 - RNA, 22 nt, Artificial Sequence
  Synthesized RNAi sequence
agaaacccuuagacacagcaaa

SEQ ID NO: 11362 - RNA, 22 nt, Artificial Sequence
  Synthesized RNAi sequence
agaaacggugugacaagcuaca

SEQ ID NO: 11363 - RNA, 22 nt, Artificial Sequence
  Synthesized RNAi sequence
agaaagugugucucuuaacuac

SEQ ID NO: 11364 - RNA, 22 nt, Artificial Sequence
  Synthesized RNAi sequence
agaaauguuuacgcaaauaugc

SEQ ID NO: 11365 - RNA, 22 nt, Artificial Sequence
  Synthesized RNAi sequence
agaacaagugaggccauaauuc

SEQ ID NO: 11366 - RNA, 22 nt, Artificial Sequence
  Synthesized RNAi sequence
agaacacaagccccaacagccu

SEQ ID NO: 11367 - RNA, 22 nt, Artificial Sequence
  Synthesized RNAi sequence
agaacugacuuaaaguucuuua

SEQ ID NO: 11368 - RNA, 22 nt, Artificial Sequence
  Synthesized RNAi sequence
agaacuuccuuccuuaaagaaa

SEQ ID NO: 11369 - RNA, 22 nt, Artificial Sequence
  Synthesized RNAi sequence
agaagaaguguuuuaauucaac

SEQ ID NO: 11370 - RNA, 22 nt, Artificial Sequence
  Synthesized RNAi sequence
agaagcagcgugcauagcaggg

SEQ ID NO: 11371 - RNA, 22 nt, Artificial Sequence
  Synthesized RNAi sequence
agaagucauguuuagcaacagc

SEQ ID NO: 11372 - RNA, 22 nt, Artificial Sequence
  Synthesized RNAi sequence
agaagucuuuguuaaaauuacc

SEQ ID NO: 11373 - RNA, 22 nt, Artificial Sequence
  Synthesized RNAi sequence
agaaguguuuuaauucaacaga

SEQ ID NO: 11374 - RNA, 22 nt, Artificial Sequence
  Synthesized RNAi sequence
agaauacaugucuaacaugugu

SEQ ID NO: 11375 - RNA, 22 nt, Artificial Sequence
  Synthesized RNAi sequence
agaaucaauuaaauugucaucu

SEQ ID NO: 11376 - RNA, 22 nt, Artificial Sequence
  Synthesized RNAi sequence
agaaucuacaacaggaacucca

SEQ ID NO: 11377 - RNA, 22 nt, Artificial Sequence
  Synthesized RNAi sequence
agaaugcaucugucauccaaac

SEQ ID NO: 11378 - RNA, 22 nt, Artificial Sequence
  Synthesized RNAi sequence
agaauuugcuuguuccaauuac

SEQ ID NO: 11379 - RNA, 22 nt, Artificial Sequence
  Synthesized RNAi sequence
agacacagcaaagucauagaag

SEQ ID NO: 11380 - RNA, 22 nt, Artificial Sequence
  Synthesized RNAi sequence
agacacgaaccguucaaucaua

SEQ ID NO: 11381 - RNA, 22 nt, Artificial Sequence
  Synthesized RNAi sequence
agacacucauaaagucuguguu

SEQ ID NO: 11382 - RNA, 22 nt, Artificial Sequence
  Synthesized RNAi sequence
agacaucagcauacuccugauu

SEQ ID NO: 11383 - RNA, 22 nt, Artificial Sequence
  Synthesized RNAi sequence
agaccuugagaugcauaagugc

SEQ ID NO: 11384 - RNA, 22 nt, Artificial Sequence
  Synthesized RNAi sequence
agacgaggucugccauugugua

SEQ ID NO: 11385 - RNA, 22 nt, Artificial Sequence
  Synthesized RNAi sequence
agacguugacgugauauaugug

SEQ ID NO: 11386 - RNA, 22 nt, Artificial Sequence
  Synthesized RNAi sequence
agacuguaugcgguguguacau

SEQ ID NO: 11387 - RNA, 22 nt, Artificial Sequence
  Synthesized RNAi sequence
agagaaagugugucucuuaacu

SEQ ID NO: 11388 - RNA, 22 nt, Artificial Sequence
  Synthesized RNAi sequence
agagaauaaaacauuaaaguuu

SEQ ID NO: 11389 - RNA, 22 nt, Artificial Sequence
  Synthesized RNAi sequence
agagacaccagcuacggugcga

SEQ ID NO: 11390 - RNA, 22 nt, Artificial Sequence
  Synthesized RNAi sequence
agagacacucauaaagucugug

SEQ ID NO: 11391 - RNA, 22 nt, Artificial Sequence
  Synthesized RNAi sequence
agagaguaucaucauugagaaa

SEQ ID NO: 11392 - RNA, 22 nt, Artificial Sequence
  Synthesized RNAi sequence
agagcaaaauucaugagguccu

SEQ ID NO: 11393 - RNA, 22 nt, Artificial Sequence
  Synthesized RNAi sequence
agagcuauguaaguuuacaucc

SEQ ID NO: 11394 - RNA, 22 nt, Artificial Sequence
  Synthesized RNAi sequence
agaguaucaucauugagaaaug

SEQ ID NO: 11395 - RNA, 22 nt, Artificial Sequence
  Synthesized RNAi sequence
agaguuuuaaccucucuuccgu

SEQ ID NO: 11396 - RNA, 22 nt, Artificial Sequence
  Synthesized RNAi sequence
agauaaaagugcauuaacauug

SEQ ID NO: 11397 - RNA, 22 nt, Artificial Sequence
  Synthesized RNAi sequence
agauagagacaccagcuacggu

SEQ ID NO: 11398 - RNA, 22 nt, Artificial Sequence
  Synthesized RNAi sequence
agaucuugauuaucuaauguca

SEQ ID NO: 11399 - RNA, 22 nt, Artificial Sequence
  Synthesized RNAi sequence
agaugcauaagugcuauugaaa

SEQ ID NO: 11400 - RNA, 22 nt, Artificial Sequence
  Synthesized RNAi sequence
agaugucaaaagcccuguauac

SEQ ID NO: 11401 - RNA, 22 nt, Artificial Sequence
  Synthesized RNAi sequence
agauuaccagaagcagcgugca

SEQ ID NO: 11402 - RNA, 22 nt, Artificial Sequence
  Synthesized RNAi sequence
agauuauaacgauaguagucau

SEQ ID NO: 11403 - RNA, 22 nt, Artificial Sequence
  Synthesized RNAi sequence
agauucauuugaguuauaguag

SEQ ID NO: 11404 - RNA, 22 nt, Artificial Sequence
  Synthesized RNAi sequence
agcaaagaagaaguguuuuaau

SEQ ID NO: 11405 - RNA, 22 nt, Artificial Sequence
  Synthesized RNAi sequence
agcaaagucauagaagucuuug

SEQ ID NO: 11406 - RNA, 22 nt, Artificial Sequence
  Synthesized RNAi sequence
agcaacagcuggacaauccuua

SEQ ID NO: 11407 - RNA, 22 nt, Artificial Sequence
  Synthesized RNAi sequence
agcaacauuguuaguaagugca

SEQ ID NO: 11408 - RNA, 22 nt, Artificial Sequence
  Synthesized RNAi sequence
agcacacucauuagcuaaucua

SEQ ID NO: 11409 - RNA, 22 nt, Artificial Sequence
  Synthesized RNAi sequence
agcacguagugcguuuaucuag

SEQ ID NO: 11410 - RNA, 22 nt, Artificial Sequence
  Synthesized RNAi sequence
agcagcauacacaaguaauucc

SEQ ID NO: 11411 - RNA, 22 nt, Artificial Sequence
  Synthesized RNAi sequence
agcagcauuaccauccugagca

SEQ ID NO: 11412 - RNA, 22 nt, Artificial Sequence
  Synthesized RNAi sequence
agcagcgugcauagcaggguca

SEQ ID NO: 11413 - RNA, 22 nt, Artificial Sequence
  Synthesized RNAi sequence
agcagggucagcagcauacaca

SEQ ID NO: 11414 - RNA, 22 nt, Artificial Sequence
  Synthesized RNAi sequence
agcaguuguggcaucuccugau

SEQ ID NO: 11415 - RNA, 22 nt, Artificial Sequence
  Synthesized RNAi sequence
agcauaacagaauacaugucua

SEQ ID NO: 11416 - RNA, 22 nt, Artificial Sequence
  Synthesized RNAi sequence
agcauacuccugauuaggaugu

SEQ ID NO: 11417 - RNA, 22 nt, Artificial Sequence
  Synthesized RNAi sequence
agcauagacgaggucugccauu

SEQ ID NO: 11418 - RNA, 22 nt, Artificial Sequence
  Synthesized RNAi sequence
agcaucgucagagaguaucauc

SEQ ID NO: 11419 - RNA, 22 nt, Artificial Sequence
  Synthesized RNAi sequence
agcaucuauagcuaaagacacg

SEQ ID NO: 11420 - RNA, 22 nt, Artificial Sequence
  Synthesized RNAi sequence
agcauguuaggcauggcucuau

SEQ ID NO: 11421 - RNA, 22 nt, Artificial Sequence
  Synthesized RNAi sequence
agcauuaauacagccaccaucg

SEQ ID NO: 11422 - RNA, 22 nt, Artificial Sequence
  Synthesized RNAi sequence
agcauuaccauccugagcaaag

SEQ ID NO: 11423 - RNA, 22 nt, Artificial Sequence
  Synthesized RNAi sequence
agcauuguauguugagagcaaa

SEQ ID NO: 11424 - RNA, 22 nt, Artificial Sequence
  Synthesized RNAi sequence
agcauuucgcauggcaucacag

SEQ ID NO: 11425 - RNA, 22 nt, Artificial Sequence
  Synthesized RNAi sequence
agccaccaucguaacaaucaaa

SEQ ID NO: 11426 - RNA, 22 nt, Artificial Sequence
  Synthesized RNAi sequence
agccacuagaccuugagaugca

SEQ ID NO: 11427 - RNA, 22 nt, Artificial Sequence
  Synthesized RNAi sequence
agccccaacagccuguaagacu

SEQ ID NO: 11428 - RNA, 22 nt, Artificial Sequence
  Synthesized RNAi sequence
agcccuggucaagguuaauaua

SEQ ID NO: 11429 - RNA, 22 nt, Artificial Sequence
  Synthesized RNAi sequence
agcccuguauacgacaucagua

SEQ ID NO: 11430 - RNA, 22 nt, Artificial Sequence
  Synthesized RNAi sequence
agccggccccuaggauucuuga

SEQ ID NO: 11431 - RNA, 22 nt, Artificial Sequence
  Synthesized RNAi sequence
agccucauaaaacucagguucc

SEQ ID NO: 11432 - RNA, 22 nt, Artificial Sequence
  Synthesized RNAi sequence
agccuguaagacuguaugcggu

SEQ ID NO: 11433 - RNA, 22 nt, Artificial Sequence
  Synthesized RNAi sequence
agccuuaccccauuuauuaaau

SEQ ID NO: 11434 - RNA, 22 nt, Artificial Sequence
  Synthesized RNAi sequence
agcgugcauagcagggucagca

SEQ ID NO: 11435 - RNA, 22 nt, Artificial Sequence
  Synthesized RNAi sequence
agcuaaucuauagaaacggugu

SEQ ID NO: 11436 - RNA, 22 nt, Artificial Sequence
  Synthesized RNAi sequence
agcuacaacacguuguauguuu

SEQ ID NO: 11437 - RNA, 22 nt, Artificial Sequence
  Synthesized RNAi sequence
agcuacggugcgagcucuauuc

SEQ ID NO: 11438 - RNA, 22 nt, Artificial Sequence
  Synthesized RNAi sequence
agcuacugaaaagcacguagug

SEQ ID NO: 11439 - RNA, 22 nt, Artificial Sequence
  Synthesized RNAi sequence
agcuacuuuaucauuguagaug

SEQ ID NO: 11440 - RNA, 22 nt, Artificial Sequence
  Synthesized RNAi sequence
agcuauguaaguuuacauccug

SEQ ID NO: 11441 - RNA, 22 nt, Artificial Sequence
  Synthesized RNAi sequence
agcuccucuaguggcggcuauu

SEQ ID NO: 11442 - RNA, 22 nt, Artificial Sequence
  Synthesized RNAi sequence
agcucuauucuuugcacuaaug

SEQ ID NO: 11443 - RNA, 22 nt, Artificial Sequence
  Synthesized RNAi sequence
agcucucugaagugguauccag

SEQ ID NO: 11444 - RNA, 22 nt, Artificial Sequence
  Synthesized RNAi sequence
agcugauuugucuagguuguug

SEQ ID NO: 11445 - RNA, 22 nt, Artificial Sequence
  Synthesized RNAi sequence
agcuggacaauccuuaaguaaa

SEQ ID NO: 11446 - RNA, 22 nt, Artificial Sequence
  Synthesized RNAi sequence
agcuuucuuauguauuguaagu

SEQ ID NO: 11447 - RNA, 22 nt, Artificial Sequence
  Synthesized RNAi sequence
aggaacuccacuaccuggcgug

SEQ ID NO: 11448 - RNA, 22 nt, Artificial Sequence
  Synthesized RNAi sequence
aggaagguacacauaaucauca

SEQ ID NO: 11449 - RNA, 22 nt, Artificial Sequence
  Synthesized RNAi sequence
aggauaaucccaacccauaagg

SEQ ID NO: 11450 - RNA, 22 nt, Artificial Sequence
  Synthesized RNAi sequence
aggauucuugauggaucugggu

SEQ ID NO: 11451 - RNA, 22 nt, Artificial Sequence
  Synthesized RNAi sequence
aggcauggcucuaucacauuua

SEQ ID NO: 11452 - RNA, 22 nt, Artificial Sequence
  Synthesized RNAi sequence
aggcauuaacaaugaauaauaa

SEQ ID NO: 11453 - RNA, 22 nt, Artificial Sequence
  Synthesized RNAi sequence
aggccauaauucuaagcauguu

SEQ ID NO: 11454 - RNA, 22 nt, Artificial Sequence
  Synthesized RNAi sequence
aggcuuuguuaagucaguguca

SEQ ID NO: 11455 - RNA, 22 nt, Artificial Sequence
  Synthesized RNAi sequence
agggaugacauuacguuuugua

SEQ ID NO: 11456 - RNA, 22 nt, Artificial Sequence
  Synthesized RNAi sequence
agggucagcagcauacacaagu

SEQ ID NO: 11457 - RNA, 22 nt, Artificial Sequence
  Synthesized RNAi sequence
agguacacauaaucaucacccu

SEQ ID NO: 11458 - RNA, 22 nt, Artificial Sequence
  Synthesized RNAi sequence
aggucagucucaguccaacauu

SEQ ID NO: 11459 - RNA, 22 nt, Artificial Sequence
  Synthesized RNAi sequence
agguccuuuaguaaggucaguc

SEQ ID NO: 11460 - RNA, 22 nt, Artificial Sequence
  Synthesized RNAi sequence
aggucugccauuguguauuuag

SEQ ID NO: 11461 - RNA, 22 nt, Artificial Sequence
  Synthesized RNAi sequence
agguuaauauaggcauuaacaa

SEQ ID NO: 11462 - RNA, 22 nt, Artificial Sequence
  Synthesized RNAi sequence
agguucccaauaccuugaagug

SEQ ID NO: 11463 - RNA, 22 nt, Artificial Sequence
  Synthesized RNAi sequence
agguuguugacgaugacuuggu

SEQ ID NO: 11464 - RNA, 22 nt, Artificial Sequence
  Synthesized RNAi sequence
aguaagaaucaauuaaauuguc

SEQ ID NO: 11465 - RNA, 22 nt, Artificial Sequence
  Synthesized RNAi sequence
aguaagacguugacgugauaua

SEQ ID NO: 11466 - RNA, 22 nt, Artificial Sequence
  Synthesized RNAi sequence
aguaagcauaacagaauacaug

SEQ ID NO: 11467 - RNA, 22 nt, Artificial Sequence
  Synthesized RNAi sequence
aguaaggucagucucaguccaa

SEQ ID NO: 11468 - RNA, 22 nt, Artificial Sequence
  Synthesized RNAi sequence
aguaagugcagcuacugaaaag

SEQ ID NO: 11469 - RNA, 22 nt, Artificial Sequence
  Synthesized RNAi sequence
aguaaguggguaagcaucuaua

SEQ ID NO: 11470 - RNA, 22 nt, Artificial Sequence
  Synthesized RNAi sequence
aguaauagauuaccagaagcag

SEQ ID NO: 11471 - RNA, 22 nt, Artificial Sequence
  Synthesized RNAi sequence
aguaauuccuuaaaacuaaguc

SEQ ID NO: 11472 - RNA, 22 nt, Artificial Sequence
  Synthesized RNAi sequence
aguacaaaugaaagacaucagc

SEQ ID NO: 11473 - RNA, 22 nt, Artificial Sequence
  Synthesized RNAi sequence
aguacaccaacaauaccagcau

SEQ ID NO: 11474 - RNA, 22 nt, Artificial Sequence
  Synthesized RNAi sequence
aguacuacagauagagacacca

SEQ ID NO: 11475 - RNA, 22 nt, Artificial Sequence
  Synthesized RNAi sequence
aguacuagugccugugccgcac

SEQ ID NO: 11476 - RNA, 22 nt, Artificial Sequence
  Synthesized RNAi sequence
aguagauaaaagugcauuaaca

SEQ ID NO: 11477 - RNA, 22 nt, Artificial Sequence
  Synthesized RNAi sequence
aguagcuccucuaguggcggcu

SEQ ID NO: 11478 - RNA, 22 nt, Artificial Sequence
  Synthesized RNAi sequence
aguagucauaaucgcugauagc

SEQ ID NO: 11479 - RNA, 22 nt, Artificial Sequence
  Synthesized RNAi sequence
aguaguugucugauaucacaca

SEQ ID NO: 11480 - RNA, 22 nt, Artificial Sequence
  Synthesized RNAi sequence
aguaucaucauugagaaauguu

SEQ ID NO: 11481 - RNA, 22 nt, Artificial Sequence
  Synthesized RNAi sequence
aguauuucuuuuaaugugucac

SEQ ID NO: 11482 - RNA, 22 nt, Artificial Sequence
  Synthesized RNAi sequence
agucagugucaacaugugacuc

SEQ ID NO: 11483 - RNA, 22 nt, Artificial Sequence
  Synthesized RNAi sequence
agucauaaucgcugauagcagc

SEQ ID NO: 11484 - RNA, 22 nt, Artificial Sequence
  Synthesized RNAi sequence
agucauagaagucuuuguuaaa

SEQ ID NO: 11485 - RNA, 22 nt, Artificial Sequence
  Synthesized RNAi sequence
agucauauuuuaacaaauccca

SEQ ID NO: 11486 - RNA, 22 nt, Artificial Sequence
  Synthesized RNAi sequence
agucauguuuagcaacagcugg

SEQ ID NO: 11487 - RNA, 22 nt, Artificial Sequence
  Synthesized RNAi sequence
agucuagagcuauguaaguuua

SEQ ID NO: 11488 - RNA, 22 nt, Artificial Sequence
  Synthesized RNAi sequence
agucuagccuuaccccauuuau

SEQ ID NO: 11489 - RNA, 22 nt, Artificial Sequence
  Synthesized RNAi sequence
agucuguguuguaaauugcgga

SEQ ID NO: 11490 - RNA, 22 nt, Artificial Sequence
  Synthesized RNAi sequence
agucuuuguuaaaauuaccggg

SEQ ID NO: 11491 - RNA, 22 nt, Artificial Sequence
  Synthesized RNAi sequence
agugaaccgccacacaugacca

SEQ ID NO: 11492 - RNA, 22 nt, Artificial Sequence
  Synthesized RNAi sequence
agugaggccauaauucuaagca

SEQ ID NO: 11493 - RNA, 22 nt, Artificial Sequence
  Synthesized RNAi sequence
agugcagcuacugaaaagcacg

SEQ ID NO: 11494 - RNA, 22 nt, Artificial Sequence
  Synthesized RNAi sequence
agugcaucuugauccucauaac

SEQ ID NO: 11495 - RNA, 22 nt, Artificial Sequence
  Synthesized RNAi sequence
agugcauuaacauuggccguga

SEQ ID NO: 11496 - RNA, 22 nt, Artificial Sequence
  Synthesized RNAi sequence
agugcguuuaucuaguaauaga

SEQ ID NO: 11497 - RNA, 22 nt, Artificial Sequence
  Synthesized RNAi sequence
agugcuauugaaacacacaaca

SEQ ID NO: 11498 - RNA, 22 nt, Artificial Sequence
  Synthesized RNAi sequence
aguggguaagcaucuauagcua

SEQ ID NO: 11499 - RNA, 22 nt, Artificial Sequence
  Synthesized RNAi sequence
agugguauccaguugaaacuac

SEQ ID NO: 11500 - RNA, 22 nt, Artificial Sequence
  Synthesized RNAi sequence
agugucaacaugugacucugca

SEQ ID NO: 11501 - RNA, 22 nt, Artificial Sequence
  Synthesized RNAi sequence
agugugucucuuaacuacaaag

SEQ ID NO: 11502 - RNA, 22 nt, Artificial Sequence
  Synthesized RNAi sequence
aguguuaucauuaguaagcaua

SEQ ID NO: 11503 - RNA, 22 nt, Artificial Sequence
  Synthesized RNAi sequence
aguguuuuaauucaacagaacu

SEQ ID NO: 11504 - RNA, 22 nt, Artificial Sequence
  Synthesized RNAi sequence
aguuaaagcccuggucaagguu

SEQ ID NO: 11505 - RNA, 22 nt, Artificial Sequence
  Synthesized RNAi sequence
aguuaacacaauuuggguggua

SEQ ID NO: 11506 - RNA, 22 nt, Artificial Sequence
  Synthesized RNAi sequence
aguuaccauugagaucuugauu

SEQ ID NO: 11507 - RNA, 22 nt, Artificial Sequence
  Synthesized RNAi sequence
aguuagagaaagugugucucuu

SEQ ID NO: 11508 - RNA, 22 nt, Artificial Sequence
  Synthesized RNAi sequence
aguuauaguagggaugacauua

SEQ ID NO: 11509 - RNA, 22 nt, Artificial Sequence
  Synthesized RNAi sequence
aguucuuuaugcuagccacuag

SEQ ID NO: 11510 - RNA, 22 nt, Artificial Sequence
  Synthesized RNAi sequence
aguugaaacuacaaauggaaca

SEQ ID NO: 11511 - RNA, 22 nt, Artificial Sequence
  Synthesized RNAi sequence
aguugucugauaucacacauug

SEQ ID NO: 11512 - RNA, 22 nt, Artificial Sequence
  Synthesized RNAi sequence
aguuguggcaucuccugaugag

SEQ ID NO: 11513 - RNA, 22 nt, Artificial Sequence
  Synthesized RNAi sequence
aguuuacauccugauuauguac

SEQ ID NO: 11514 - RNA, 22 nt, Artificial Sequence
  Synthesized RNAi sequence
aguuugaaaagcaacauuguua

SEQ ID NO: 11515 - RNA, 22 nt, Artificial Sequence
  Synthesized RNAi sequence
aguuugcacaaugcagaaugca

SEQ ID NO: 11516 - RNA, 22 nt, Artificial Sequence
  Synthesized RNAi sequence
aguuuuaaccucucuuccguga

SEQ ID NO: 11517 - RNA, 22 nt, Artificial Sequence
  Synthesized RNAi sequence
auaaaacauuaaaguuugcaca

SEQ ID NO: 11518 - RNA, 22 nt, Artificial Sequence
  Synthesized RNAi sequence
auaaaacucagguucccaauac

SEQ ID NO: 11519 - RNA, 22 nt, Artificial Sequence
  Synthesized RNAi sequence
auaaaagugcauuaacauuggc

SEQ ID NO: 11520 - RNA, 22 nt, Artificial Sequence
  Synthesized RNAi sequence
auaaagaacugacuuaaaguuc

SEQ ID NO: 11521 - RNA, 22 nt, Artificial Sequence
  Synthesized RNAi sequence
auaaagucuagccuuaccccau

SEQ ID NO: 11522 - RNA, 22 nt, Artificial Sequence
  Synthesized RNAi sequence
auaaagucuguguuguaaauug

SEQ ID NO: 11523 - RNA, 22 nt, Artificial Sequence
  Synthesized RNAi sequence
auaacagaauacaugucuaaca

SEQ ID NO: 11524 - RNA, 22 nt, Artificial Sequence
  Synthesized RNAi sequence
auaacgauaguagucauaaucg

SEQ ID NO: 11525 - RNA, 22 nt, Artificial Sequence
  Synthesized RNAi sequence
auaacggucaaagaguuuuaac

SEQ ID NO: 11526 - RNA, 22 nt, Artificial Sequence
  Synthesized RNAi sequence
auaacucauugaaucauaauaa

SEQ ID NO: 11527 - RNA, 22 nt, Artificial Sequence
  Synthesized RNAi sequence
auaagaaucuacaacaggaacu

SEQ ID NO: 11528 - RNA, 22 nt, Artificial Sequence
  Synthesized RNAi sequence
auaagcaguuguggcaucuccu

SEQ ID NO: 11529 - RNA, 22 nt, Artificial Sequence
  Synthesized RNAi sequence
auaaggugaggguuuucuacau

SEQ ID NO: 11530 - RNA, 22 nt, Artificial Sequence
  Synthesized RNAi sequence
auaagugcuauugaaacacaca

SEQ ID NO: 11531 - RNA, 22 nt, Artificial Sequence
  Synthesized RNAi sequence
auaauaaagaacugacuuaaag

SEQ ID NO: 11532 - RNA, 22 nt, Artificial Sequence
  Synthesized RNAi sequence
auaauaaagucuagccuuaccc

SEQ ID NO: 11533 - RNA, 22 nt, Artificial Sequence
  Synthesized RNAi sequence
auaauaagaaucuacaacagga

SEQ ID NO: 11534 - RNA, 22 nt, Artificial Sequence
  Synthesized RNAi sequence
auaaucaucacccuguuuaacu

SEQ ID NO: 11535 - RNA, 22 nt, Artificial Sequence
  Synthesized RNAi sequence
auaaucccaacccauaagguga

SEQ ID NO: 11536 - RNA, 22 nt, Artificial Sequence
  Synthesized RNAi sequence
auaaucgcugauagcagcauua

SEQ ID NO: 11537 - RNA, 22 nt, Artificial Sequence
  Synthesized RNAi sequence
auaauucuaagcauguuaggca

SEQ ID NO: 11538 - RNA, 22 nt, Artificial Sequence
  Synthesized RNAi sequence
auacacaaguaauuccuuaaaa

SEQ ID NO: 11539 - RNA, 22 nt, Artificial Sequence
  Synthesized RNAi sequence
auacaugucuaacauguguccu

SEQ ID NO: 11540 - RNA, 22 nt, Artificial Sequence
  Synthesized RNAi sequence
auaccagcauuucgcauggcau

SEQ ID NO: 11541 - RNA, 22 nt, Artificial Sequence
  Synthesized RNAi sequence
auaccaguuaccauugagaucu

SEQ ID NO: 11542 - RNA, 22 nt, Artificial Sequence
  Synthesized RNAi sequence
auaccuugaaguguuaucauua

SEQ ID NO: 11543 - RNA, 22 nt, Artificial Sequence
  Synthesized RNAi sequence
auacgacaucaguacuagugcc

SEQ ID NO: 11544 - RNA, 22 nt, Artificial Sequence
  Synthesized RNAi sequence
auacuccugauuaggauguuua

SEQ ID NO: 11545 - RNA, 22 nt, Artificial Sequence
  Synthesized RNAi sequence
auacuuaagauucauuugaguu

SEQ ID NO: 11546 - RNA, 22 nt, Artificial Sequence
  Synthesized RNAi sequence
auacuuaucggcaauuuuguua

SEQ ID NO: 11547 - RNA, 22 nt, Artificial Sequence
  Synthesized RNAi sequence
auacuugagcacacucauuagc

SEQ ID NO: 11548 - RNA, 22 nt, Artificial Sequence
  Synthesized RNAi sequence
auagaaacggugugacaagcua

SEQ ID NO: 11549 - RNA, 22 nt, Artificial Sequence
  Synthesized RNAi sequence
auagaagucuuuguuaaaauua

SEQ ID NO: 11550 - RNA, 22 nt, Artificial Sequence
  Synthesized RNAi sequence
auagaauuugcuuguuccaauu

SEQ ID NO: 11551 - RNA, 22 nt, Artificial Sequence
  Synthesized RNAi sequence
auagacgaggucugccauugug

SEQ ID NO: 11552 - RNA, 22 nt, Artificial Sequence
  Synthesized RNAi sequence
auagagacaccagcuacggugc

SEQ ID NO: 11553 - RNA, 22 nt, Artificial Sequence
  Synthesized RNAi sequence
auagagacacucauaaagucug

SEQ ID NO: 11554 - RNA, 22 nt, Artificial Sequence
  Synthesized RNAi sequence
auagauuaccagaagcagcgug

SEQ ID NO: 11555 - RNA, 22 nt, Artificial Sequence
  Synthesized RNAi sequence
auagcagcauuaccauccugag

SEQ ID NO: 11556 - RNA, 22 nt, Artificial Sequence
  Synthesized RNAi sequence
auagcagggucagcagcauaca

SEQ ID NO: 11557 - RNA, 22 nt, Artificial Sequence
  Synthesized RNAi sequence
auagccucauaaaacucagguu

SEQ ID NO: 11558 - RNA, 22 nt, Artificial Sequence
  Synthesized RNAi sequence
auagcuaaagacacgaaccguu

SEQ ID NO: 11559 - RNA, 22 nt, Artificial Sequence
  Synthesized RNAi sequence
auaguacuacagauagagacac

SEQ ID NO: 11560 - RNA, 22 nt, Artificial Sequence
  Synthesized RNAi sequence
auaguagucauaaucgcugaua

SEQ ID NO: 11561 - RNA, 22 nt, Artificial Sequence
  Synthesized RNAi sequence
auaguaguugucugauaucaca

SEQ ID NO: 11562 - RNA, 22 nt, Artificial Sequence
  Synthesized RNAi sequence
auagugaaccgccacacaugac

SEQ ID NO: 11563 - RNA, 22 nt, Artificial Sequence
  Synthesized RNAi sequence
auauaggcauuaacaaugaaua

SEQ ID NO: 11564 - RNA, 22 nt, Artificial Sequence
  Synthesized RNAi sequence
auauagugaaccgccacacaug

SEQ ID NO: 11565 - RNA, 22 nt, Artificial Sequence
  Synthesized RNAi sequence
auauaugugguaccaugucacc

SEQ ID NO: 11566 - RNA, 22 nt, Artificial Sequence
  Synthesized RNAi sequence
auaucacacauuguugguagau

SEQ ID NO: 11567 - RNA, 22 nt, Artificial Sequence
  Synthesized RNAi sequence
auaugcgaaaagugcaucuuga

SEQ ID NO: 11568 - RNA, 22 nt, Artificial Sequence
  Synthesized RNAi sequence
auaugcguaaaacucauucaca

SEQ ID NO: 11569 - RNA, 22 nt, Artificial Sequence
  Synthesized RNAi sequence
auaugugguaccaugucaccgu

SEQ ID NO: 11570 - RNA, 22 nt, Artificial Sequence
  Synthesized RNAi sequence
auauuuaaaauaacggucaaag

SEQ ID NO: 11571 - RNA, 22 nt, Artificial Sequence
  Synthesized RNAi sequence
auauuuuaacaaaucccacuua

SEQ ID NO: 11572 - RNA, 22 nt, Artificial Sequence
  Synthesized RNAi sequence
aucaaaaugccuuaaagcauag

SEQ ID NO: 11573 - RNA, 22 nt, Artificial Sequence
  Synthesized RNAi sequence
aucaaaguacuuaucaacaacu

SEQ ID NO: 11574 - RNA, 22 nt, Artificial Sequence
  Synthesized RNAi sequence
aucaacaacuucaacuacaaau

SEQ ID NO: 11575 - RNA, 22 nt, Artificial Sequence
  Synthesized RNAi sequence
aucaauuaaauugucaucuucg

SEQ ID NO: 11576 - RNA, 22 nt, Artificial Sequence
  Synthesized RNAi sequence
aucacacauuguugguagauua

SEQ ID NO: 11577 - RNA, 22 nt, Artificial Sequence
  Synthesized RNAi sequence
aucacauuuaggauaaucccaa

SEQ ID NO: 11578 - RNA, 22 nt, Artificial Sequence
  Synthesized RNAi sequence
aucacccuguuuaacuagcauu

SEQ ID NO: 11579 - RNA, 22 nt, Artificial Sequence
  Synthesized RNAi sequence
aucaccgaaaucauaccaguua

SEQ ID NO: 11580 - RNA, 22 nt, Artificial Sequence
  Synthesized RNAi sequence
aucagcauacuccugauuagga

SEQ ID NO: 11581 - RNA, 22 nt, Artificial Sequence
  Synthesized RNAi sequence
aucaguacuagugccugugccg

SEQ ID NO: 11582 - RNA, 22 nt, Artificial Sequence
  Synthesized RNAi sequence
aucaguagauaaaagugcauua

SEQ ID NO: 11583 - RNA, 22 nt, Artificial Sequence
  Synthesized RNAi sequence
aucauaauaaagucuagccuua

SEQ ID NO: 11584 - RNA, 22 nt, Artificial Sequence
  Synthesized RNAi sequence
aucauaccaguuaccauugaga

SEQ ID NO: 11585 - RNA, 22 nt, Artificial Sequence
  Synthesized RNAi sequence
aucaucacccuguuuaacuagc

SEQ ID NO: 11586 - RNA, 22 nt, Artificial Sequence
  Synthesized RNAi sequence
aucaucauugagaaauguuuac

SEQ ID NO: 11587 - RNA, 22 nt, Artificial Sequence
  Synthesized RNAi sequence
aucauguagcuuucuuauguau

SEQ ID NO: 11588 - RNA, 22 nt, Artificial Sequence
  Synthesized RNAi sequence
aucauugagaaauguuuacgca

SEQ ID NO: 11589 - RNA, 22 nt, Artificial Sequence
  Synthesized RNAi sequence
aucauuguagaugucaaaagcc

SEQ ID NO: 11590 - RNA, 22 nt, Artificial Sequence
  Synthesized RNAi sequence
auccaguugaaacuacaaaugg

SEQ ID NO: 11591 - RNA, 22 nt, Artificial Sequence
  Synthesized RNAi sequence
aucccaacccauaaggugaggg

SEQ ID NO: 11592 - RNA, 22 nt, Artificial Sequence
  Synthesized RNAi sequence
aucccacuuaauguaaggcuuu

SEQ ID NO: 11593 - RNA, 22 nt, Artificial Sequence
  Synthesized RNAi sequence
auccucauaacucauugaauca

SEQ ID NO: 11594 - RNA, 22 nt, Artificial Sequence
  Synthesized RNAi sequence
auccugagcaaagaagaagugu

SEQ ID NO: 11595 - RNA, 22 nt, Artificial Sequence
  Synthesized RNAi sequence
auccugauuauguacaacaccu

SEQ ID NO: 11596 - RNA, 22 nt, Artificial Sequence
  Synthesized RNAi sequence
aucgcugauagcagcauuacca

SEQ ID NO: 11597 - RNA, 22 nt, Artificial Sequence
  Synthesized RNAi sequence
aucggcaauuuuguuaccauca

SEQ ID NO: 11598 - RNA, 22 nt, Artificial Sequence
  Synthesized RNAi sequence
aucguaacaaucaaaguacuua

SEQ ID NO: 11599 - RNA, 22 nt, Artificial Sequence
  Synthesized RNAi sequence
aucgucagagaguaucaucauu

SEQ ID NO: 11600 - RNA, 22 nt, Artificial Sequence
  Synthesized RNAi sequence
aucuaaugucaguacaccaaca

SEQ ID NO: 11601 - RNA, 22 nt, Artificial Sequence
  Synthesized RNAi sequence
aucuacaacaggaacuccacua

SEQ ID NO: 11602 - RNA, 22 nt, Artificial Sequence
  Synthesized RNAi sequence
aucuaguaauagauuaccagaa

SEQ ID NO: 11603 - RNA, 22 nt, Artificial Sequence
  Synthesized RNAi sequence
aucuauagaaacggugugacaa

SEQ ID NO: 11604 - RNA, 22 nt, Artificial Sequence
  Synthesized RNAi sequence
aucuauagcuaaagacacgaac

SEQ ID NO: 11605 - RNA, 22 nt, Artificial Sequence
  Synthesized RNAi sequence
aucuccugaugagguuccaccu

SEQ ID NO: 11606 - RNA, 22 nt, Artificial Sequence
  Synthesized RNAi sequence
aucucuauuucuauagagacac

SEQ ID NO: 11607 - RNA, 22 nt, Artificial Sequence
  Synthesized RNAi sequence
aucuggguaaggaagguacaca

SEQ ID NO: 11608 - RNA, 22 nt, Artificial Sequence
  Synthesized RNAi sequence
aucugucauccaaacaguuaac

SEQ ID NO: 11609 - RNA, 22 nt, Artificial Sequence
  Synthesized RNAi sequence
aucuucguccuuuucuuggaag

SEQ ID NO: 11610 - RNA, 22 nt, Artificial Sequence
  Synthesized RNAi sequence
aucuugauccucauaacucauu

SEQ ID NO: 11611 - RNA, 22 nt, Artificial Sequence
  Synthesized RNAi sequence
aucuugauuaucuaaugucagu

SEQ ID NO: 11612 - RNA, 22 nt, Artificial Sequence
  Synthesized RNAi sequence
augaaagacaucagcauacucc

SEQ ID NO: 11613 - RNA, 22 nt, Artificial Sequence
  Synthesized RNAi sequence
augaaaucaccgaaaucauacc

SEQ ID NO: 11614 - RNA, 22 nt, Artificial Sequence
  Synthesized RNAi sequence
augaauaauaagaaucuacaac

SEQ ID NO: 11615 - RNA, 22 nt, Artificial Sequence
  Synthesized RNAi sequence
augacauuacguuuuguauaug

SEQ ID NO: 11616 - RNA, 22 nt, Artificial Sequence
  Synthesized RNAi sequence
augaccauuucacucaauacuu

SEQ ID NO: 11617 - RNA, 22 nt, Artificial Sequence
  Synthesized RNAi sequence
augacuugguuagcauuaauac

SEQ ID NO: 11618 - RNA, 22 nt, Artificial Sequence
  Synthesized RNAi sequence
augagguccuuuaguaagguca

SEQ ID NO: 11619 - RNA, 22 nt, Artificial Sequence
  Synthesized RNAi sequence
augagguuccaccugguuuaac

SEQ ID NO: 11620 - RNA, 22 nt, Artificial Sequence
  Synthesized RNAi sequence
augcagaaugcaucugucaucc

SEQ ID NO: 11621 - RNA, 22 nt, Artificial Sequence
  Synthesized RNAi sequence
augcauaagugcuauugaaaca

SEQ ID NO: 11622 - RNA, 22 nt, Artificial Sequence
  Synthesized RNAi sequence
augcaucugucauccaaacagu

SEQ ID NO: 11623 - RNA, 22 nt, Artificial Sequence
  Synthesized RNAi sequence
augccuuaaagcauagacgagg

SEQ ID NO: 11624 - RNA, 22 nt, Artificial Sequence
  Synthesized RNAi sequence
augcgaaaagugcaucuugauc

SEQ ID NO: 11625 - RNA, 22 nt, Artificial Sequence
  Synthesized RNAi sequence
augcgguguguacauagccuca

SEQ ID NO: 11626 - RNA, 22 nt, Artificial Sequence
  Synthesized RNAi sequence
augcguaaaacucauucacaaa

SEQ ID NO: 11627 - RNA, 22 nt, Artificial Sequence
  Synthesized RNAi sequence
augcuagccacuagaccuugag

SEQ ID NO: 11628 - RNA, 22 nt, Artificial Sequence
  Synthesized RNAi sequence
auggaaaaccagcugauuuguc

SEQ ID NO: 11629 - RNA, 22 nt, Artificial Sequence
  Synthesized RNAi sequence
auggaucuggguaaggaaggua

SEQ ID NO: 11630 - RNA, 22 nt, Artificial Sequence
  Synthesized RNAi sequence
auggcauacuuaagauucauuu

SEQ ID NO: 11631 - RNA, 22 nt, Artificial Sequence
  Synthesized RNAi sequence
auggcucuaucacauuuaggau

SEQ ID NO: 11632 - RNA, 22 nt, Artificial Sequence
  Synthesized RNAi sequence
auguaaggcuuuguuaagucag

SEQ ID NO: 11633 - RNA, 22 nt, Artificial Sequence
  Synthesized RNAi sequence
auguaaguuuacauccugauua

SEQ ID NO: 11634 - RNA, 22 nt, Artificial Sequence
  Synthesized RNAi sequence
auguacaacaccuagcucucug

SEQ ID NO: 11635 - RNA, 22 nt, Artificial Sequence
  Synthesized RNAi sequence
auguagcuuucuuauguauugu

SEQ ID NO: 11636 - RNA, 22 nt, Artificial Sequence
  Synthesized RNAi sequence
auguauuguaaguacaaaugaa

SEQ ID NO: 11637 - RNA, 22 nt, Artificial Sequence
  Synthesized RNAi sequence
augucaaaagcccuguauacga

SEQ ID NO: 11638 - RNA, 22 nt, Artificial Sequence
  Synthesized RNAi sequence
augucaccgucuauucuaaacu

SEQ ID NO: 11639 - RNA, 22 nt, Artificial Sequence
  Synthesized RNAi sequence
augucaguacaccaacaauacc

SEQ ID NO: 11640 - RNA, 22 nt, Artificial Sequence
  Synthesized RNAi sequence
augucuaacauguguccuguua

SEQ ID NO: 11641 - RNA, 22 nt, Artificial Sequence
  Synthesized RNAi sequence
augucugaucccaauauuuaaa

SEQ ID NO: 11642 - RNA, 22 nt, Artificial Sequence
  Synthesized RNAi sequence
augugacucugcaguuaaagcc

SEQ ID NO: 11643 - RNA, 22 nt, Artificial Sequence
  Synthesized RNAi sequence
augugguaccaugucaccgucu

SEQ ID NO: 11644 - RNA, 22 nt, Artificial Sequence
  Synthesized RNAi sequence
augugucacaauuaccuucauc

SEQ ID NO: 11645 - RNA, 22 nt, Artificial Sequence
  Synthesized RNAi sequence
auguguccuguuaacucaucau

SEQ ID NO: 11646 - RNA, 22 nt, Artificial Sequence
  Synthesized RNAi sequence
auguuaggcauggcucuaucac

SEQ ID NO: 11647 - RNA, 22 nt, Artificial Sequence
  Synthesized RNAi sequence
auguugagagcaaaauucauga

SEQ ID NO: 11648 - RNA, 22 nt, Artificial Sequence
  Synthesized RNAi sequence
auguugguaguuagagaaagug

SEQ ID NO: 11649 - RNA, 22 nt, Artificial Sequence
  Synthesized RNAi sequence
auguuuacgcaaauaugcguaa

SEQ ID NO: 11650 - RNA, 22 nt, Artificial Sequence
  Synthesized RNAi sequence
auguuuagcaacagcuggacaa

SEQ ID NO: 11651 - RNA, 22 nt, Artificial Sequence
  Synthesized RNAi sequence
auguuuaguaaguggguaagca

SEQ ID NO: 11652 - RNA, 22 nt, Artificial Sequence
  Synthesized RNAi sequence
auguuugcgagcaagaacaagu

SEQ ID NO: 11653 - RNA, 22 nt, Artificial Sequence
  Synthesized RNAi sequence
auuaaaguuugcacaaugcaga

SEQ ID NO: 11654 - RNA, 22 nt, Artificial Sequence
  Synthesized RNAi sequence
auuaaauggaaaaccagcugau

SEQ ID NO: 11655 - RNA, 22 nt, Artificial Sequence
  Synthesized RNAi sequence
auuaaauugucaucuucguccu

SEQ ID NO: 11656 - RNA, 22 nt, Artificial Sequence
  Synthesized RNAi sequence
auuaacauuggccgugacagcu

SEQ ID NO: 11657 - RNA, 22 nt, Artificial Sequence
  Synthesized RNAi sequence
auuaauacagccaccaucguaa

SEQ ID NO: 11658 - RNA, 22 nt, Artificial Sequence
  Synthesized RNAi sequence
auuaccagaagcagcgugcaua

SEQ ID NO: 11659 - RNA, 22 nt, Artificial Sequence
  Synthesized RNAi sequence
auuaccauccugagcaaagaag

SEQ ID NO: 11660 - RNA, 22 nt, Artificial Sequence
  Synthesized RNAi sequence
auuaccggguuugacaguuuga

SEQ ID NO: 11661 - RNA, 22 nt, Artificial Sequence
  Synthesized RNAi sequence
auuaccuucaucaaaaugccuu

SEQ ID NO: 11662 - RNA, 22 nt, Artificial Sequence
  Synthesized RNAi sequence
auuacguuuuguauaugcgaaa

SEQ ID NO: 11663 - RNA, 22 nt, Artificial Sequence
  Synthesized RNAi sequence
auuacuacaguagcuccucuag

SEQ ID NO: 11664 - RNA, 22 nt, Artificial Sequence
  Synthesized RNAi sequence
auuagcuaaucuauagaaacgg

SEQ ID NO: 11665 - RNA, 22 nt, Artificial Sequence
  Synthesized RNAi sequence
auuaggauguuuaguaaguggg

SEQ ID NO: 11666 - RNA, 22 nt, Artificial Sequence
  Synthesized RNAi sequence
auuauaaauuguuucuucaugu

SEQ ID NO: 11667 - RNA, 22 nt, Artificial Sequence
  Synthesized RNAi sequence
auuauaacgauaguagucauaa

SEQ ID NO: 11668 - RNA, 22 nt, Artificial Sequence
  Synthesized RNAi sequence
auuaucuaaugucaguacacca

SEQ ID NO: 11669 - RNA, 22 nt, Artificial Sequence
  Synthesized RNAi sequence
auuauguacaacaccuagcucu

SEQ ID NO: 11670 - RNA, 22 nt, Artificial Sequence
  Synthesized RNAi sequence
auucaacagaacuuccuuccuu

SEQ ID NO: 11671 - RNA, 22 nt, Artificial Sequence
  Synthesized RNAi sequence
auucacaaagucugugucaaca

SEQ ID NO: 11672 - RNA, 22 nt, Artificial Sequence
  Synthesized RNAi sequence
auucauuugaguuauaguaggg

SEQ ID NO: 11673 - RNA, 22 nt, Artificial Sequence
  Synthesized RNAi sequence
auuccuuaaaacuaagucuaga

SEQ ID NO: 11674 - RNA, 22 nt, Artificial Sequence
  Synthesized RNAi sequence
auucuaagcauguuaggcaugg

SEQ ID NO: 11675 - RNA, 22 nt, Artificial Sequence
  Synthesized RNAi sequence
auucuugauggaucuggguaag

SEQ ID NO: 11676 - RNA, 22 nt, Artificial Sequence
  Synthesized RNAi sequence
auucuuugcacuaauggcauac

SEQ ID NO: 11677 - RNA, 22 nt, Artificial Sequence
  Synthesized RNAi sequence
auugaaacacacaacagcaucg

SEQ ID NO: 11678 - RNA, 22 nt, Artificial Sequence
  Synthesized RNAi sequence
auugaaucauaauaaagucuag

SEQ ID NO: 11679 - RNA, 22 nt, Artificial Sequence
  Synthesized RNAi sequence
auugagaaauguuuacgcaaau

SEQ ID NO: 11680 - RNA, 22 nt, Artificial Sequence
  Synthesized RNAi sequence
auugagaucuugauuaucuaau

SEQ ID NO: 11681 - RNA, 22 nt, Artificial Sequence
  Synthesized RNAi sequence
auugcaaagaacacaagcccca

SEQ ID NO: 11682 - RNA, 22 nt, Artificial Sequence
  Synthesized RNAi sequence
auugcggacauacuuaucggca

SEQ ID NO: 11683 - RNA, 22 nt, Artificial Sequence
  Synthesized RNAi sequence
auuggucauaguacuacagaua

SEQ ID NO: 11684 - RNA, 22 nt, Artificial Sequence
  Synthesized RNAi sequence
auuguaaguacaaaugaaagac

SEQ ID NO: 11685 - RNA, 22 nt, Artificial Sequence
  Synthesized RNAi sequence
auuguagaugucaaaagcccug

SEQ ID NO: 11686 - RNA, 22 nt, Artificial Sequence
  Synthesized RNAi sequence
auuguauguugagagcaaaauu

SEQ ID NO: 11687 - RNA, 22 nt, Artificial Sequence
  Synthesized RNAi sequence
auugucaucuucguccuuuucu

SEQ ID NO: 11688 - RNA, 22 nt, Artificial Sequence
  Synthesized RNAi sequence
auuguguauuuaguaagacguu

SEQ ID NO: 11689 - RNA, 22 nt, Artificial Sequence
  Synthesized RNAi sequence
auuguuaguaagugcagcuacu

SEQ ID NO: 11690 - RNA, 22 nt, Artificial Sequence
  Synthesized RNAi sequence
auuguugguagauuauaacgau

SEQ ID NO: 11691 - RNA, 22 nt, Artificial Sequence
  Synthesized RNAi sequence
auuguuucuucauguugguagu

SEQ ID NO: 11692 - RNA, 22 nt, Artificial Sequence
  Synthesized RNAi sequence
auuuaaaauaacggucaaagag

SEQ ID NO: 11693 - RNA, 22 nt, Artificial Sequence
  Synthesized RNAi sequence
auuuaggauaaucccaacccau

SEQ ID NO: 11694 - RNA, 22 nt, Artificial Sequence
  Synthesized RNAi sequence
auuuaguaagacguugacguga

SEQ ID NO: 11695 - RNA, 22 nt, Artificial Sequence
  Synthesized RNAi sequence
auuuauuaaauggaaaaccagc

SEQ ID NO: 11696 - RNA, 22 nt, Artificial Sequence
  Synthesized RNAi sequence
auuucacucaauacuugagcac

SEQ ID NO: 11697 - RNA, 22 nt, Artificial Sequence
  Synthesized RNAi sequence
auuucuauagagacacucauaa

SEQ ID NO: 11698 - RNA, 22 nt, Artificial Sequence
  Synthesized RNAi sequence
auuugaguuauaguagggauga

SEQ ID NO: 11699 - RNA, 22 nt, Artificial Sequence
  Synthesized RNAi sequence
auuugcuuguuccaauuacuac

SEQ ID NO: 11700 - RNA, 22 nt, Artificial Sequence
  Synthesized RNAi sequence
auuugggugguaugucugaucc

SEQ ID NO: 11701 - RNA, 22 nt, Artificial Sequence
  Synthesized RNAi sequence
auuugucuagguuguugacgau

SEQ ID NO: 11702 - RNA, 22 nt, Artificial Sequence
  Synthesized RNAi sequence
auuuuaacaaaucccacuuaau

SEQ ID NO: 11703 - RNA, 22 nt, Artificial Sequence
  Synthesized RNAi sequence
auuuuguuaccaucaguagaua

SEQ ID NO: 11704 - RNA, 22 nt, Artificial Sequence
  Synthesized RNAi sequence
uaaaacauuaaaguuugcacaa

SEQ ID NO: 11705 - RNA, 22 nt, Artificial Sequence
  Synthesized RNAi sequence
uaaaacuaagucuagagcuaug

SEQ ID NO: 11706 - RNA, 22 nt, Artificial Sequence
  Synthesized RNAi sequence
uaaaacucagguucccaauacc

SEQ ID NO: 11707 - RNA, 22 nt, Artificial Sequence
  Synthesized RNAi sequence
uaaaacucauucacaaagucug

SEQ ID NO: 11708 - RNA, 22 nt, Artificial Sequence
  Synthesized RNAi sequence
uaaaagugcauuaacauuggcc

SEQ ID NO: 11709 - RNA, 22 nt, Artificial Sequence
  Synthesized RNAi sequence
uaaaauaacggucaaagaguuu

SEQ ID NO: 11710 - RNA, 22 nt, Artificial Sequence
  Synthesized RNAi sequence
uaaaauuaccggguuugacagu

SEQ ID NO: 11711 - RNA, 22 nt, Artificial Sequence
  Synthesized RNAi sequence
uaaagaaacccuuagacacagc

SEQ ID NO: 11712 - RNA, 22 nt, Artificial Sequence
  Synthesized RNAi sequence
uaaagaacugacuuaaaguucu

SEQ ID NO: 11713 - RNA, 22 nt, Artificial Sequence
  Synthesized RNAi sequence
uaaagaagucauguuuagcaac

SEQ ID NO: 11714 - RNA, 22 nt, Artificial Sequence
  Synthesized RNAi sequence
uaaagacacgaaccguucaauc

SEQ ID NO: 11715 - RNA, 22 nt, Artificial Sequence
  Synthesized RNAi sequence
uaaagcauagacgaggucugcc

SEQ ID NO: 11716 - RNA, 22 nt, Artificial Sequence
  Synthesized RNAi sequence
uaaagcccuggucaagguuaau

SEQ ID NO: 11717 - RNA, 22 nt, Artificial Sequence
  Synthesized RNAi sequence
uaaagucuguguuguaaauugc

SEQ ID NO: 11718 - RNA, 22 nt, Artificial Sequence
  Synthesized RNAi sequence
uaaaguucuuuaugcuagccac

SEQ ID NO: 11719 - RNA, 22 nt, Artificial Sequence
  Synthesized RNAi sequence
uaaaguuugcacaaugcagaau

SEQ ID NO: 11720 - RNA, 22 nt, Artificial Sequence
  Synthesized RNAi sequence
uaaauggaaaaccagcugauuu

SEQ ID NO: 11721 - RNA, 22 nt, Artificial Sequence
  Synthesized RNAi sequence
uaaauugcggacauacuuaucg

SEQ ID NO: 11722 - RNA, 22 nt, Artificial Sequence
  Synthesized RNAi sequence
uaaauugucaucuucguccuuu

SEQ ID NO: 11723 - RNA, 22 nt, Artificial Sequence
  Synthesized RNAi sequence
uaaauuguuucuucauguuggu

SEQ ID NO: 11724 - RNA, 22 nt, Artificial Sequence
  Synthesized RNAi sequence
uaacaaaucccacuuaauguaa

SEQ ID NO: 11725 - RNA, 22 nt, Artificial Sequence
  Synthesized RNAi sequence
uaacaaucaaaguacuuaucaa

SEQ ID NO: 11726 - RNA, 22 nt, Artificial Sequence
  Synthesized RNAi sequence
uaacaaugaauaauaagaaucu

SEQ ID NO: 11727 - RNA, 22 nt, Artificial Sequence
  Synthesized RNAi sequence
uaacacaauuugggugguaugu

SEQ ID NO: 11728 - RNA, 22 nt, Artificial Sequence
  Synthesized RNAi sequence
uaacagaauacaugucuaacau

SEQ ID NO: 11729 - RNA, 22 nt, Artificial Sequence
  Synthesized RNAi sequence
uaacauauagugaaccgccaca

SEQ ID NO: 11730 - RNA, 22 nt, Artificial Sequence
  Synthesized RNAi sequence
uaacauguguccuguuaacuca

SEQ ID NO: 11731 - RNA, 22 nt, Artificial Sequence
  Synthesized RNAi sequence
uaaccucucuuccgugaaguca

SEQ ID NO: 11732 - RNA, 22 nt, Artificial Sequence
  Synthesized RNAi sequence
uaacgauaguagucauaaucgc

SEQ ID NO: 11733 - RNA, 22 nt, Artificial Sequence
  Synthesized RNAi sequence
uaacggucaaagaguuuuaacc

SEQ ID NO: 11734 - RNA, 22 nt, Artificial Sequence
  Synthesized RNAi sequence
uaacuagcauuguauguugaga

SEQ ID NO: 11735 - RNA, 22 nt, Artificial Sequence
  Synthesized RNAi sequence
uaacucaucauguagcuuucuu

SEQ ID NO: 11736 - RNA, 22 nt, Artificial Sequence
  Synthesized RNAi sequence
uaacucauugaaucauaauaaa

SEQ ID NO: 11737 - RNA, 22 nt, Artificial Sequence
  Synthesized RNAi sequence
uaagaaucuacaacaggaacuc

SEQ ID NO: 11738 - RNA, 22 nt, Artificial Sequence
  Synthesized RNAi sequence
uaagacguugacgugauauaug

SEQ ID NO: 11739 - RNA, 22 nt, Artificial Sequence
  Synthesized RNAi sequence
uaagauucauuugaguuauagu

SEQ ID NO: 11740 - RNA, 22 nt, Artificial Sequence
  Synthesized RNAi sequence
uaagcaguuguggcaucuccug

SEQ ID NO: 11741 - RNA, 22 nt, Artificial Sequence
  Synthesized RNAi sequence
uaagcauaacagaauacauguc

SEQ ID NO: 11742 - RNA, 22 nt, Artificial Sequence
  Synthesized RNAi sequence
uaagcaucuauagcuaaagaca

SEQ ID NO: 11743 - RNA, 22 nt, Artificial Sequence
  Synthesized RNAi sequence
uaagcauguuaggcauggcucu

SEQ ID NO: 11744 - RNA, 22 nt, Artificial Sequence
  Synthesized RNAi sequence
uaaggaagguacacauaaucau

SEQ ID NO: 11745 - RNA, 22 nt, Artificial Sequence
  Synthesized RNAi sequence
uaaggcuuuguuaagucagugu

SEQ ID NO: 11746 - RNA, 22 nt, Artificial Sequence
  Synthesized RNAi sequence
uaaggucagucucaguccaaca

SEQ ID NO: 11747 - RNA, 22 nt, Artificial Sequence
  Synthesized RNAi sequence
uaaggugaggguuuucuacauc

SEQ ID NO: 11748 - RNA, 22 nt, Artificial Sequence
  Synthesized RNAi sequence
uaaguacaaaugaaagacauca

SEQ ID NO: 11749 - RNA, 22 nt, Artificial Sequence
  Synthesized RNAi sequence
uaagucagugucaacaugugac

SEQ ID NO: 11750 - RNA, 22 nt, Artificial Sequence
  Synthesized RNAi sequence
uaagucuagagcuauguaaguu

SEQ ID NO: 11751 - RNA, 22 nt, Artificial Sequence
  Synthesized RNAi sequence
uaagugcagcuacugaaaagca

SEQ ID NO: 11752 - RNA, 22 nt, Artificial Sequence
  Synthesized RNAi sequence
uaagugcuauugaaacacacaa

SEQ ID NO: 11753 - RNA, 22 nt, Artificial Sequence
  Synthesized RNAi sequence
uaaguggguaagcaucuauagc

SEQ ID NO: 11754 - RNA, 22 nt, Artificial Sequence
  Synthesized RNAi sequence
uaaguuuacauccugauuaugu

SEQ ID NO: 11755 - RNA, 22 nt, Artificial Sequence
  Synthesized RNAi sequence
uaauaaagaacugacuuaaagu

SEQ ID NO: 11756 - RNA, 22 nt, Artificial Sequence
  Synthesized RNAi sequence
uaauaaagucuagccuuacccc

SEQ ID NO: 11757 - RNA, 22 nt, Artificial Sequence
  Synthesized RNAi sequence
uaauaagaaucuacaacaggaa

SEQ ID NO: 11758 - RNA, 22 nt, Artificial Sequence
  Synthesized RNAi sequence
uaauacagccaccaucguaaca

SEQ ID NO: 11759 - RNA, 22 nt, Artificial Sequence
  Synthesized RNAi sequence
uaauagauuaccagaagcagcg

SEQ ID NO: 11760 - RNA, 22 nt, Artificial Sequence
  Synthesized RNAi sequence
uaauauaggcauuaacaaugaa

SEQ ID NO: 11761 - RNA, 22 nt, Artificial Sequence
  Synthesized RNAi sequence
uaaucaucacccuguuuaacua

SEQ ID NO: 11762 - RNA, 22 nt, Artificial Sequence
  Synthesized RNAi sequence
uaaucgcugauagcagcauuac

SEQ ID NO: 11763 - RNA, 22 nt, Artificial Sequence
  Synthesized RNAi sequence
uaaucuauagaaacggugugac

SEQ ID NO: 11764 - RNA, 22 nt, Artificial Sequence
  Synthesized RNAi sequence
uaauggcauacuuaagauucau

SEQ ID NO: 11765 - RNA, 22 nt, Artificial Sequence
  Synthesized RNAi sequence
uaauguaaggcuuuguuaaguc

SEQ ID NO: 11766 - RNA, 22 nt, Artificial Sequence
  Synthesized RNAi sequence
uaaugucaguacaccaacaaua

SEQ ID NO: 11767 - RNA, 22 nt, Artificial Sequence
  Synthesized RNAi sequence
uaaugugucacaauuaccuuca

SEQ ID NO: 11768 - RNA, 22 nt, Artificial Sequence
  Synthesized RNAi sequence
uaauuccuuaaaacuaagucua

SEQ ID NO: 11769 - RNA, 22 nt, Artificial Sequence
  Synthesized RNAi sequence
uaauucuaagcauguuaggcau

SEQ ID NO: 11770 - RNA, 22 nt, Artificial Sequence
  Synthesized RNAi sequence
uacaaaacagccggccccuagg

SEQ ID NO: 11771 - RNA, 22 nt, Artificial Sequence
  Synthesized RNAi sequence
uacaaaguaagaaucaauuaaa

SEQ ID NO: 11772 - RNA, 22 nt, Artificial Sequence
  Synthesized RNAi sequence
uacaaauaguaguugucugaua

SEQ ID NO: 11773 - RNA, 22 nt, Artificial Sequence
  Synthesized RNAi sequence
uacaaaugaaagacaucagcau

SEQ ID NO: 11774 - RNA, 22 nt, Artificial Sequence
  Synthesized RNAi sequence
uacaacaccuagcucucugaag

SEQ ID NO: 11775 - RNA, 22 nt, Artificial Sequence
  Synthesized RNAi sequence
uacaacacguuguauguuugcg

SEQ ID NO: 11776 - RNA, 22 nt, Artificial Sequence
  Synthesized RNAi sequence
uacaacaggaacuccacuaccu

SEQ ID NO: 11777 - RNA, 22 nt, Artificial Sequence
  Synthesized RNAi sequence
uacacaaguaauuccuuaaaac

SEQ ID NO: 11778 - RNA, 22 nt, Artificial Sequence
  Synthesized RNAi sequence
uacaccaacaauaccagcauuu

SEQ ID NO: 11779 - RNA, 22 nt, Artificial Sequence
  Synthesized RNAi sequence
uacagauagagacaccagcuac

SEQ ID NO: 11780 - RNA, 22 nt, Artificial Sequence
  Synthesized RNAi sequence
uacagccaccaucguaacaauc

SEQ ID NO: 11781 - RNA, 22 nt, Artificial Sequence
  Synthesized RNAi sequence
uacaguagcuccucuaguggcg

SEQ ID NO: 11782 - RNA, 22 nt, Artificial Sequence
  Synthesized RNAi sequence
uacauagccucauaaaacucag

SEQ ID NO: 11783 - RNA, 22 nt, Artificial Sequence
  Synthesized RNAi sequence
uacauccugauuauguacaaca

SEQ ID NO: 11784 - RNA, 22 nt, Artificial Sequence
  Synthesized RNAi sequence
uacaugucuaacauguguccug

SEQ ID NO: 11785 - RNA, 22 nt, Artificial Sequence
  Synthesized RNAi sequence
uaccagaagcagcgugcauagc

SEQ ID NO: 11786 - RNA, 22 nt, Artificial Sequence
  Synthesized RNAi sequence
uaccagcauuucgcauggcauc

SEQ ID NO: 11787 - RNA, 22 nt, Artificial Sequence
  Synthesized RNAi sequence
uaccaguuaccauugagaucuu

SEQ ID NO: 11788 - RNA, 22 nt, Artificial Sequence
  Synthesized RNAi sequence
uaccaucaguagauaaaagugc

SEQ ID NO: 11789 - RNA, 22 nt, Artificial Sequence
  Synthesized RNAi sequence
uaccauccugagcaaagaagaa

SEQ ID NO: 11790 - RNA, 22 nt, Artificial Sequence
  Synthesized RNAi sequence
uaccaugucaccgucuauucua

SEQ ID NO: 11791 - RNA, 22 nt, Artificial Sequence
  Synthesized RNAi sequence
uaccauugagaucuugauuauc

SEQ ID NO: 11792 - RNA, 22 nt, Artificial Sequence
  Synthesized RNAi sequence
uaccggguuugacaguuugaaa

SEQ ID NO: 11793 - RNA, 22 nt, Artificial Sequence
  Synthesized RNAi sequence
uaccuggcgugguuuguaugaa

SEQ ID NO: 11794 - RNA, 22 nt, Artificial Sequence
  Synthesized RNAi sequence
uaccuucaucaaaaugccuuaa

SEQ ID NO: 11795 - RNA, 22 nt, Artificial Sequence
  Synthesized RNAi sequence
uaccuugaaguguuaucauuag

SEQ ID NO: 11796 - RNA, 22 nt, Artificial Sequence
  Synthesized RNAi sequence
uacgacaucaguacuagugccu

SEQ ID NO: 11797 - RNA, 22 nt, Artificial Sequence
  Synthesized RNAi sequence
uacgcaaauaugcguaaaacuc

SEQ ID NO: 11798 - RNA, 22 nt, Artificial Sequence
  Synthesized RNAi sequence
uacggugcgagcucuauucuuu

SEQ ID NO: 11799 - RNA, 22 nt, Artificial Sequence
  Synthesized RNAi sequence
uacguuuuguauaugcgaaaag

SEQ ID NO: 11800 - RNA, 22 nt, Artificial Sequence
  Synthesized RNAi sequence
uacuacagauagagacaccagc

SEQ ID NO: 11801 - RNA, 22 nt, Artificial Sequence
  Synthesized RNAi sequence
uacuacaguagcuccucuagug

SEQ ID NO: 11802 - RNA, 22 nt, Artificial Sequence
  Synthesized RNAi sequence
uacuccugauuaggauguuuag

SEQ ID NO: 11803 - RNA, 22 nt, Artificial Sequence
  Synthesized RNAi sequence
uacugaaaagcacguagugcgu

SEQ ID NO: 11804 - RNA, 22 nt, Artificial Sequence
  Synthesized RNAi sequence
uacuuaagauucauuugaguua

SEQ ID NO: 11805 - RNA, 22 nt, Artificial Sequence
  Synthesized RNAi sequence
uacuuaucggcaauuuuguuac

SEQ ID NO: 11806 - RNA, 22 nt, Artificial Sequence
  Synthesized RNAi sequence
uacuugagcacacucauuagcu

SEQ ID NO: 11807 - RNA, 22 nt, Artificial Sequence
  Synthesized RNAi sequence
uacuuuaucauuguagauguca

SEQ ID NO: 11808 - RNA, 22 nt, Artificial Sequence
  Synthesized RNAi sequence
uagaaacggugugacaagcuac

SEQ ID NO: 11809 - RNA, 22 nt, Artificial Sequence
  Synthesized RNAi sequence
uagaagucuuuguuaaaauuac

SEQ ID NO: 11810 - RNA, 22 nt, Artificial Sequence
  Synthesized RNAi sequence
uagacacagcaaagucauagaa

SEQ ID NO: 11811 - RNA, 22 nt, Artificial Sequence
  Synthesized RNAi sequence
uagaccuugagaugcauaagug

SEQ ID NO: 11812 - RNA, 22 nt, Artificial Sequence
  Synthesized RNAi sequence
uagacgaggucugccauugugu

SEQ ID NO: 11813 - RNA, 22 nt, Artificial Sequence
  Synthesized RNAi sequence
uagagaaagugugucucuuaac

SEQ ID NO: 11814 - RNA, 22 nt, Artificial Sequence
  Synthesized RNAi sequence
uagagaauaaaacauuaaaguu

SEQ ID NO: 11815 - RNA, 22 nt, Artificial Sequence
  Synthesized RNAi sequence
uagagacaccagcuacggugcg

SEQ ID NO: 11816 - RNA, 22 nt, Artificial Sequence
  Synthesized RNAi sequence
uagagacacucauaaagucugu

SEQ ID NO: 11817 - RNA, 22 nt, Artificial Sequence
  Synthesized RNAi sequence
uagagcuauguaaguuuacauc

SEQ ID NO: 11818 - RNA, 22 nt, Artificial Sequence
  Synthesized RNAi sequence
uagauaaaagugcauuaacauu

SEQ ID NO: 11819 - RNA, 22 nt, Artificial Sequence
  Synthesized RNAi sequence
uagaugucaaaagcccuguaua

SEQ ID NO: 11820 - RNA, 22 nt, Artificial Sequence
  Synthesized RNAi sequence
uagauuaccagaagcagcgugc

SEQ ID NO: 11821 - RNA, 22 nt, Artificial Sequence
  Synthesized RNAi sequence
uagauuauaacgauaguaguca

SEQ ID NO: 11822 - RNA, 22 nt, Artificial Sequence
  Synthesized RNAi sequence
uagcaacagcuggacaauccuu

SEQ ID NO: 11823 - RNA, 22 nt, Artificial Sequence
  Synthesized RNAi sequence
uagcagcauuaccauccugagc

SEQ ID NO: 11824 - RNA, 22 nt, Artificial Sequence
  Synthesized RNAi sequence
uagcagggucagcagcauacac

SEQ ID NO: 11825 - RNA, 22 nt, Artificial Sequence
  Synthesized RNAi sequence
uagcauuaauacagccaccauc

SEQ ID NO: 11826 - RNA, 22 nt, Artificial Sequence
  Synthesized RNAi sequence
uagcauuguauguugagagcaa

SEQ ID NO: 11827 - RNA, 22 nt, Artificial Sequence
  Synthesized RNAi sequence
uagccacuagaccuugagaugc

SEQ ID NO: 11828 - RNA, 22 nt, Artificial Sequence
  Synthesized RNAi sequence
uagccucauaaaacucagguuc

SEQ ID NO: 11829 - RNA, 22 nt, Artificial Sequence
  Synthesized RNAi sequence
uagccuuaccccauuuauuaaa

SEQ ID NO: 11830 - RNA, 22 nt, Artificial Sequence
  Synthesized RNAi sequence
uagcuaaagacacgaaccguuc

SEQ ID NO: 11831 - RNA, 22 nt, Artificial Sequence
  Synthesized RNAi sequence
uagcuaaucuauagaaacggug

SEQ ID NO: 11832 - RNA, 22 nt, Artificial Sequence
  Synthesized RNAi sequence
uagcuccucuaguggcggcuau

SEQ ID NO: 11833 - RNA, 22 nt, Artificial Sequence
  Synthesized RNAi sequence
uagcucucugaagugguaucca

SEQ ID NO: 11834 - RNA, 22 nt, Artificial Sequence
  Synthesized RNAi sequence
uagcuuucuuauguauuguaag

SEQ ID NO: 11835 - RNA, 22 nt, Artificial Sequence
  Synthesized RNAi sequence
uaggauaaucccaacccauaag

SEQ ID NO: 11836 - RNA, 22 nt, Artificial Sequence
  Synthesized RNAi sequence
uaggauguuuaguaagugggua

SEQ ID NO: 11837 - RNA, 22 nt, Artificial Sequence
  Synthesized RNAi sequence
uaggauucuugauggaucuggg

SEQ ID NO: 11838 - RNA, 22 nt, Artificial Sequence
  Synthesized RNAi sequence
uaggcauuaacaaugaauaaua

SEQ ID NO: 11839 - RNA, 22 nt, Artificial Sequence
  Synthesized RNAi sequence
uagggaugacauuacguuuugu

SEQ ID NO: 11840 - RNA, 22 nt, Artificial Sequence
  Synthesized RNAi sequence
uaggugggaacacuguagagaa

SEQ ID NO: 11841 - RNA, 22 nt, Artificial Sequence
  Synthesized RNAi sequence
uagguuguugacgaugacuugg

SEQ ID NO: 11842 - RNA, 22 nt, Artificial Sequence
  Synthesized RNAi sequence
uaguaagacguugacgugauau

SEQ ID NO: 11843 - RNA, 22 nt, Artificial Sequence
  Synthesized RNAi sequence
uaguaaggucagucucagucca

SEQ ID NO: 11844 - RNA, 22 nt, Artificial Sequence
  Synthesized RNAi sequence
uaguaagugcagcuacugaaaa

SEQ ID NO: 11845 - RNA, 22 nt, Artificial Sequence
  Synthesized RNAi sequence
uaguaaguggguaagcaucuau

SEQ ID NO: 11846 - RNA, 22 nt, Artificial Sequence
  Synthesized RNAi sequence
uaguaauagauuaccagaagca

SEQ ID NO: 11847 - RNA, 22 nt, Artificial Sequence
  Synthesized RNAi sequence
uaguacuacagauagagacacc

SEQ ID NO: 11848 - RNA, 22 nt, Artificial Sequence
  Synthesized RNAi sequence
uaguagucauaaucgcugauag

SEQ ID NO: 11849 - RNA, 22 nt, Artificial Sequence
  Synthesized RNAi sequence
uaguaguugucugauaucacac

SEQ ID NO: 11850 - RNA, 22 nt, Artificial Sequence
  Synthesized RNAi sequence
uagucauaaucgcugauagcag

SEQ ID NO: 11851 - RNA, 22 nt, Artificial Sequence
  Synthesized RNAi sequence
uagugaaccgccacacaugacc

SEQ ID NO: 11852 - RNA, 22 nt, Artificial Sequence
  Synthesized RNAi sequence
uagugcguuuaucuaguaauag

SEQ ID NO: 11853 - RNA, 22 nt, Artificial Sequence
  Synthesized RNAi sequence
uaguuagagaaagugugucucu

SEQ ID NO: 11854 - RNA, 22 nt, Artificial Sequence
  Synthesized RNAi sequence
uaguugucugauaucacacauu

SEQ ID NO: 11855 - RNA, 22 nt, Artificial Sequence
  Synthesized RNAi sequence
uauaaauuguuucuucauguug

SEQ ID NO: 11856 - RNA, 22 nt, Artificial Sequence
  Synthesized RNAi sequence
uauaacgauaguagucauaauc

SEQ ID NO: 11857 - RNA, 22 nt, Artificial Sequence
  Synthesized RNAi sequence
uauacgacaucaguacuagugc

SEQ ID NO: 11858 - RNA, 22 nt, Artificial Sequence
  Synthesized RNAi sequence
uauagaaacggugugacaagcu

SEQ ID NO: 11859 - RNA, 22 nt, Artificial Sequence
  Synthesized RNAi sequence
uauagagacacucauaaagucu

SEQ ID NO: 11860 - RNA, 22 nt, Artificial Sequence
  Synthesized RNAi sequence
uauagcuaaagacacgaaccgu

SEQ ID NO: 11861 - RNA, 22 nt, Artificial Sequence
  Synthesized RNAi sequence
uauaggcauuaacaaugaauaa

SEQ ID NO: 11862 - RNA, 22 nt, Artificial Sequence
  Synthesized RNAi sequence
uauaguagggaugacauuacgu

SEQ ID NO: 11863 - RNA, 22 nt, Artificial Sequence
  Synthesized RNAi sequence
uauagugaaccgccacacauga

SEQ ID NO: 11864 - RNA, 22 nt, Artificial Sequence
  Synthesized RNAi sequence
uauaugcgaaaagugcaucuug

SEQ ID NO: 11865 - RNA, 22 nt, Artificial Sequence
  Synthesized RNAi sequence
uauaugugguaccaugucaccg

SEQ ID NO: 11866 - RNA, 22 nt, Artificial Sequence
  Synthesized RNAi sequence
uaucaacaacuucaacuacaaa

SEQ ID NO: 11867 - RNA, 22 nt, Artificial Sequence
  Synthesized RNAi sequence
uaucacacauuguugguagauu

SEQ ID NO: 11868 - RNA, 22 nt, Artificial Sequence
  Synthesized RNAi sequence
uaucacauuuaggauaauccca

SEQ ID NO: 11869 - RNA, 22 nt, Artificial Sequence
  Synthesized RNAi sequence
uaucauuaguaagcauaacaga

SEQ ID NO: 11870 - RNA, 22 nt, Artificial Sequence
  Synthesized RNAi sequence
uaucauuguagaugucaaaagc

SEQ ID NO: 11871 - RNA, 22 nt, Artificial Sequence
  Synthesized RNAi sequence
uauccaguugaaacuacaaaug

SEQ ID NO: 11872 - RNA, 22 nt, Artificial Sequence
  Synthesized RNAi sequence
uaucggcaauuuuguuaccauc

SEQ ID NO: 11873 - RNA, 22 nt, Artificial Sequence
  Synthesized RNAi sequence
uaucuaaugucaguacaccaac

SEQ ID NO: 11874 - RNA, 22 nt, Artificial Sequence
  Synthesized RNAi sequence
uaucuaguaauagauuaccaga

SEQ ID NO: 11875 - RNA, 22 nt, Artificial Sequence
  Synthesized RNAi sequence
uaugcgaaaagugcaucuugau

SEQ ID NO: 11876 - RNA, 22 nt, Artificial Sequence
  Synthesized RNAi sequence
uaugcgguguguacauagccuc

SEQ ID NO: 11877 - RNA, 22 nt, Artificial Sequence
  Synthesized RNAi sequence
uaugcguaaaacucauucacaa

SEQ ID NO: 11878 - RNA, 22 nt, Artificial Sequence
  Synthesized RNAi sequence
uaugcuagccacuagaccuuga

SEQ ID NO: 11879 - RNA, 22 nt, Artificial Sequence
  Synthesized RNAi sequence
uauguaaguuuacauccugauu

SEQ ID NO: 11880 - RNA, 22 nt, Artificial Sequence
  Synthesized RNAi sequence
uauguacaacaccuagcucucu

SEQ ID NO: 11881 - RNA, 22 nt, Artificial Sequence
  Synthesized RNAi sequence
uauguauuguaaguacaaauga

SEQ ID NO: 11882 - RNA, 22 nt, Artificial Sequence
  Synthesized RNAi sequence
uaugucugaucccaauauuuaa

SEQ ID NO: 11883 - RNA, 22 nt, Artificial Sequence
  Synthesized RNAi sequence
uaugugguaccaugucaccguc

SEQ ID NO: 11884 - RNA, 22 nt, Artificial Sequence
  Synthesized RNAi sequence
uauguugagagcaaaauucaug

SEQ ID NO: 11885 - RNA, 22 nt, Artificial Sequence
  Synthesized RNAi sequence
uauguuugcgagcaagaacaag

SEQ ID NO: 11886 - RNA, 22 nt, Artificial Sequence
  Synthesized RNAi sequence
uauuaaauggaaaaccagcuga

SEQ ID NO: 11887 - RNA, 22 nt, Artificial Sequence
  Synthesized RNAi sequence
uauucuuugcacuaauggcaua

SEQ ID NO: 11888 - RNA, 22 nt, Artificial Sequence
  Synthesized RNAi sequence
uauuggucauaguacuacagau

SEQ ID NO: 11889 - RNA, 22 nt, Artificial Sequence
  Synthesized RNAi sequence
uauuguaaguacaaaugaaaga

SEQ ID NO: 11890 - RNA, 22 nt, Artificial Sequence
  Synthesized RNAi sequence
uauuuaaaauaacggucaaaga

SEQ ID NO: 11891 - RNA, 22 nt, Artificial Sequence
  Synthesized RNAi sequence
uauuuaguaagacguugacgug

SEQ ID NO: 11892 - RNA, 22 nt, Artificial Sequence
  Synthesized RNAi sequence
uauuucuauagagacacucaua

SEQ ID NO: 11893 - RNA, 22 nt, Artificial Sequence
  Synthesized RNAi sequence
uauuucuuuuaaugugucacaa

SEQ ID NO: 11894 - RNA, 22 nt, Artificial Sequence
  Synthesized RNAi sequence
uauuuuaacaaaucccacuuaa

SEQ ID NO: 11895 - RNA, 22 nt, Artificial Sequence
  Synthesized RNAi sequence
ucaaaagcccuguauacgacau

SEQ ID NO: 11896 - RNA, 22 nt, Artificial Sequence
  Synthesized RNAi sequence
ucaaaaugccuuaaagcauaga

SEQ ID NO: 11897 - RNA, 22 nt, Artificial Sequence
  Synthesized RNAi sequence
ucaaagaguuuuaaccucucuu

SEQ ID NO: 11898 - RNA, 22 nt, Artificial Sequence
  Synthesized RNAi sequence
ucaaaguacuuaucaacaacuu

SEQ ID NO: 11899 - RNA, 22 nt, Artificial Sequence
  Synthesized RNAi sequence
ucaacaacuucaacuacaaaua

SEQ ID NO: 11900 - RNA, 22 nt, Artificial Sequence
  Synthesized RNAi sequence
ucaacagaacuuccuuccuuaa

SEQ ID NO: 11901 - RNA, 22 nt, Artificial Sequence
  Synthesized RNAi sequence
ucaacaucucuauuucuauaga

SEQ ID NO: 11902 - RNA, 22 nt, Artificial Sequence
  Synthesized RNAi sequence
ucaacaugugacucugcaguua

SEQ ID NO: 11903 - RNA, 22 nt, Artificial Sequence
  Synthesized RNAi sequence
ucaacuacaaauaguaguuguc

SEQ ID NO: 11904 - RNA, 22 nt, Artificial Sequence
  Synthesized RNAi sequence
ucaagguuaauauaggcauuaa

SEQ ID NO: 11905 - RNA, 22 nt, Artificial Sequence
  Synthesized RNAi sequence
ucaauacuugagcacacucauu

SEQ ID NO: 11906 - RNA, 22 nt, Artificial Sequence
  Synthesized RNAi sequence
ucaauuaaauugucaucuucgu

SEQ ID NO: 11907 - RNA, 22 nt, Artificial Sequence
  Synthesized RNAi sequence
ucacaaagucugugucaacauc

SEQ ID NO: 11908 - RNA, 22 nt, Artificial Sequence
  Synthesized RNAi sequence
ucacaauuaccuucaucaaaau

SEQ ID NO: 11909 - RNA, 22 nt, Artificial Sequence
  Synthesized RNAi sequence
ucacacauuguugguagauuau

SEQ ID NO: 11910 - RNA, 22 nt, Artificial Sequence
  Synthesized RNAi sequence
ucacauuuaggauaaucccaac

SEQ ID NO: 11911 - RNA, 22 nt, Artificial Sequence
  Synthesized RNAi sequence
ucacccuguuuaacuagcauug

SEQ ID NO: 11912 - RNA, 22 nt, Artificial Sequence
  Synthesized RNAi sequence
ucaccgaaaucauaccaguuac

SEQ ID NO: 11913 - RNA, 22 nt, Artificial Sequence
  Synthesized RNAi sequence
ucaccgucuauucuaaacuuaa

SEQ ID NO: 11914 - RNA, 22 nt, Artificial Sequence
  Synthesized RNAi sequence
ucacucaauacuugagcacacu

SEQ ID NO: 11915 - RNA, 22 nt, Artificial Sequence
  Synthesized RNAi sequence
ucagagaguaucaucauugaga

SEQ ID NO: 11916 - RNA, 22 nt, Artificial Sequence
  Synthesized RNAi sequence
ucagcagcauacacaaguaauu

SEQ ID NO: 11917 - RNA, 22 nt, Artificial Sequence
  Synthesized RNAi sequence
ucagcauacuccugauuaggau

SEQ ID NO: 11918 - RNA, 22 nt, Artificial Sequence
  Synthesized RNAi sequence
ucagguucccaauaccuugaag

SEQ ID NO: 11919 - RNA, 22 nt, Artificial Sequence
  Synthesized RNAi sequence
ucaguacaccaacaauaccagc

SEQ ID NO: 11920 - RNA, 22 nt, Artificial Sequence
  Synthesized RNAi sequence
ucaguacuagugccugugccgc

SEQ ID NO: 11921 - RNA, 22 nt, Artificial Sequence
  Synthesized RNAi sequence
ucagugucaacaugugacucug

SEQ ID NO: 11922 - RNA, 22 nt, Artificial Sequence
  Synthesized RNAi sequence
ucauaaagucuguguuguaaau

SEQ ID NO: 11923 - RNA, 22 nt, Artificial Sequence
  Synthesized RNAi sequence
ucauaacucauugaaucauaau

SEQ ID NO: 11924 - RNA, 22 nt, Artificial Sequence
  Synthesized RNAi sequence
ucauaauaaagucuagccuuac

SEQ ID NO: 11925 - RNA, 22 nt, Artificial Sequence
  Synthesized RNAi sequence
ucauaaucgcugauagcagcau

SEQ ID NO: 11926 - RNA, 22 nt, Artificial Sequence
  Synthesized RNAi sequence
ucauaccaguuaccauugagau

SEQ ID NO: 11927 - RNA, 22 nt, Artificial Sequence
  Synthesized RNAi sequence
ucauagaagucuuuguuaaaau

SEQ ID NO: 11928 - RNA, 22 nt, Artificial Sequence
  Synthesized RNAi sequence
ucauaguacuacagauagagac

SEQ ID NO: 11929 - RNA, 22 nt, Artificial Sequence
  Synthesized RNAi sequence
ucauauuuuaacaaaucccacu

SEQ ID NO: 11930 - RNA, 22 nt, Artificial Sequence
  Synthesized RNAi sequence
ucaucaaaaugccuuaaagcau

SEQ ID NO: 11931 - RNA, 22 nt, Artificial Sequence
  Synthesized RNAi sequence
ucaucacccuguuuaacuagca

SEQ ID NO: 11932 - RNA, 22 nt, Artificial Sequence
  Synthesized RNAi sequence
ucaucauguagcuuucuuaugu

SEQ ID NO: 11933 - RNA, 22 nt, Artificial Sequence
  Synthesized RNAi sequence
ucaucauugagaaauguuuacg

SEQ ID NO: 11934 - RNA, 22 nt, Artificial Sequence
  Synthesized RNAi sequence
ucaucuucguccuuuucuugga

SEQ ID NO: 11935 - RNA, 22 nt, Artificial Sequence
  Synthesized RNAi sequence
ucaugagguccuuuaguaaggu

SEQ ID NO: 11936 - RNA, 22 nt, Artificial Sequence
  Synthesized RNAi sequence
ucauguagcuuucuuauguauu

SEQ ID NO: 11937 - RNA, 22 nt, Artificial Sequence
  Synthesized RNAi sequence
ucauguugguaguuagagaaag

SEQ ID NO: 11938 - RNA, 22 nt, Artificial Sequence
  Synthesized RNAi sequence
ucauguuuagcaacagcuggac

SEQ ID NO: 11939 - RNA, 22 nt, Artificial Sequence
  Synthesized RNAi sequence
ucauuagcuaaucuauagaaac

SEQ ID NO: 11940 - RNA, 22 nt, Artificial Sequence
  Synthesized RNAi sequence
ucauucacaaagucugugucaa

SEQ ID NO: 11941 - RNA, 22 nt, Artificial Sequence
  Synthesized RNAi sequence
ucauugaaucauaauaaagucu

SEQ ID NO: 11942 - RNA, 22 nt, Artificial Sequence
  Synthesized RNAi sequence
ucauugagaaauguuuacgcaa

SEQ ID NO: 11943 - RNA, 22 nt, Artificial Sequence
  Synthesized RNAi sequence
ucauuguagaugucaaaagccc

SEQ ID NO: 11944 - RNA, 22 nt, Artificial Sequence
  Synthesized RNAi sequence
ucauuugaguuauaguagggau

SEQ ID NO: 11945 - RNA, 22 nt, Artificial Sequence
  Synthesized RNAi sequence
uccaaaacuuguaggugggaac

SEQ ID NO: 11946 - RNA, 22 nt, Artificial Sequence
  Synthesized RNAi sequence
uccaaacaguuaacacaauuug

SEQ ID NO: 11947 - RNA, 22 nt, Artificial Sequence
  Synthesized RNAi sequence
uccaauuacuacaguagcuccu

SEQ ID NO: 11948 - RNA, 22 nt, Artificial Sequence
  Synthesized RNAi sequence
uccaccugguuuaacauauagu

SEQ ID NO: 11949 - RNA, 22 nt, Artificial Sequence
  Synthesized RNAi sequence
uccacuaccuggcgugguuugu

SEQ ID NO: 11950 - RNA, 22 nt, Artificial Sequence
  Synthesized RNAi sequence
uccaguugaaacuacaaaugga

SEQ ID NO: 11951 - RNA, 22 nt, Artificial Sequence
  Synthesized RNAi sequence
ucccaacccauaaggugagggu

SEQ ID NO: 11952 - RNA, 22 nt, Artificial Sequence
  Synthesized RNAi sequence
ucccaauaccuugaaguguuau

SEQ ID NO: 11953 - RNA, 22 nt, Artificial Sequence
  Synthesized RNAi sequence
ucccaauauuuaaaauaacggu

SEQ ID NO: 11954 - RNA, 22 nt, Artificial Sequence
  Synthesized RNAi sequence
ucccacuuaauguaaggcuuug

SEQ ID NO: 11955 - RNA, 22 nt, Artificial Sequence
  Synthesized RNAi sequence
uccgugaagucauauuuuaaca

SEQ ID NO: 11956 - RNA, 22 nt, Artificial Sequence
  Synthesized RNAi sequence
uccucauaacucauugaaucau

SEQ ID NO: 11957 - RNA, 22 nt, Artificial Sequence
  Synthesized RNAi sequence
uccugagcaaagaagaaguguu

SEQ ID NO: 11958 - RNA, 22 nt, Artificial Sequence
  Synthesized RNAi sequence
uccugaugagguuccaccuggu

SEQ ID NO: 11959 - RNA, 22 nt, Artificial Sequence
  Synthesized RNAi sequence
uccugauuaggauguuuaguaa

SEQ ID NO: 11960 - RNA, 22 nt, Artificial Sequence
  Synthesized RNAi sequence
uccugauuauguacaacaccua

SEQ ID NO: 11961 - RNA, 22 nt, Artificial Sequence
  Synthesized RNAi sequence
uccuguuaacucaucauguagc

SEQ ID NO: 11962 - RNA, 22 nt, Artificial Sequence
  Synthesized RNAi sequence
uccuuaaaacuaagucuagagc

SEQ ID NO: 11963 - RNA, 22 nt, Artificial Sequence
  Synthesized RNAi sequence
uccuuaaagaaacccuuagaca

SEQ ID NO: 11964 - RNA, 22 nt, Artificial Sequence
  Synthesized RNAi sequence
uccuuaaguaaauuauaaauug

SEQ ID NO: 11965 - RNA, 22 nt, Artificial Sequence
  Synthesized RNAi sequence
uccuuuaguaaggucagucuca

SEQ ID NO: 11966 - RNA, 22 nt, Artificial Sequence
  Synthesized RNAi sequence
ucgcugauagcagcauuaccau

SEQ ID NO: 11967 - RNA, 22 nt, Artificial Sequence
  Synthesized RNAi sequence
ucggcaauuuuguuaccaucag

SEQ ID NO: 11968 - RNA, 22 nt, Artificial Sequence
  Synthesized RNAi sequence
ucguaacaaucaaaguacuuau

SEQ ID NO: 11969 - RNA, 22 nt, Artificial Sequence
  Synthesized RNAi sequence
ucgucagagaguaucaucauug

SEQ ID NO: 11970 - RNA, 22 nt, Artificial Sequence
  Synthesized RNAi sequence
ucuaaacuuaaagaagucaugu

SEQ ID NO: 11971 - RNA, 22 nt, Artificial Sequence
  Synthesized RNAi sequence
ucuaacauguguccuguuaacu

SEQ ID NO: 11972 - RNA, 22 nt, Artificial Sequence
  Synthesized RNAi sequence
ucuaagcauguuaggcauggcu

SEQ ID NO: 11973 - RNA, 22 nt, Artificial Sequence
  Synthesized RNAi sequence
ucuaaugucaguacaccaacaa

SEQ ID NO: 11974 - RNA, 22 nt, Artificial Sequence
  Synthesized RNAi sequence
ucuacaacaggaacuccacuac

SEQ ID NO: 11975 - RNA, 22 nt, Artificial Sequence
  Synthesized RNAi sequence
ucuagagcuauguaaguuuaca

SEQ ID NO: 11976 - RNA, 22 nt, Artificial Sequence
  Synthesized RNAi sequence
ucuagguuguugacgaugacuu

SEQ ID NO: 11977 - RNA, 22 nt, Artificial Sequence
  Synthesized RNAi sequence
ucuaguaauagauuaccagaag

SEQ ID NO: 11978 - RNA, 22 nt, Artificial Sequence
  Synthesized RNAi sequence
ucuauagaaacggugugacaag

SEQ ID NO: 11979 - RNA, 22 nt, Artificial Sequence
  Synthesized RNAi sequence
ucuauagagacacucauaaagu

SEQ ID NO: 11980 - RNA, 22 nt, Artificial Sequence
  Synthesized RNAi sequence
ucuauagcuaaagacacgaacc

SEQ ID NO: 11981 - RNA, 22 nt, Artificial Sequence
  Synthesized RNAi sequence
ucuaucacauuuaggauaaucc

SEQ ID NO: 11982 - RNA, 22 nt, Artificial Sequence
  Synthesized RNAi sequence
ucuauucuuugcacuaauggca

SEQ ID NO: 11983 - RNA, 22 nt, Artificial Sequence
  Synthesized RNAi sequence
ucuauuggucauaguacuacag

SEQ ID NO: 11984 - RNA, 22 nt, Artificial Sequence
  Synthesized RNAi sequence
ucuauuucuauagagacacuca

SEQ ID NO: 11985 - RNA, 22 nt, Artificial Sequence
  Synthesized RNAi sequence
ucuccugaugagguuccaccug

SEQ ID NO: 11986 - RNA, 22 nt, Artificial Sequence
  Synthesized RNAi sequence
ucucuauuucuauagagacacu

SEQ ID NO: 11987 - RNA, 22 nt, Artificial Sequence
  Synthesized RNAi sequence
ucucugaagugguauccaguug

SEQ ID NO: 11988 - RNA, 22 nt, Artificial Sequence
  Synthesized RNAi sequence
ucucuuaacuacaaaguaagaa

SEQ ID NO: 11989 - RNA, 22 nt, Artificial Sequence
  Synthesized RNAi sequence
ucucuuccgugaagucauauuu

SEQ ID NO: 11990 - RNA, 22 nt, Artificial Sequence
  Synthesized RNAi sequence
ucugaagugguauccaguugaa

SEQ ID NO: 11991 - RNA, 22 nt, Artificial Sequence
  Synthesized RNAi sequence
ucugauaucacacauuguuggu

SEQ ID NO: 11992 - RNA, 22 nt, Artificial Sequence
  Synthesized RNAi sequence
ucugaucccaauauuuaaaaua

SEQ ID NO: 11993 - RNA, 22 nt, Artificial Sequence
  Synthesized RNAi sequence
ucugcaguuaaagcccugguca

SEQ ID NO: 11994 - RNA, 22 nt, Artificial Sequence
  Synthesized RNAi sequence
ucugccauuguguauuuaguaa

SEQ ID NO: 11995 - RNA, 22 nt, Artificial Sequence
  Synthesized RNAi sequence
ucugucauccaaacaguuaaca

SEQ ID NO: 11996 - RNA, 22 nt, Artificial Sequence
  Synthesized RNAi sequence
ucugugaauugcaaagaacaca

SEQ ID NO: 11997 - RNA, 22 nt, Artificial Sequence
  Synthesized RNAi sequence
ucuguguuguaaauugcggaca

SEQ ID NO: 11998 - RNA, 22 nt, Artificial Sequence
  Synthesized RNAi sequence
ucuuauguauuguaaguacaaa

SEQ ID NO: 11999 - RNA, 22 nt, Artificial Sequence
  Synthesized RNAi sequence
ucuucauguugguaguuagaga

SEQ ID NO: 12000 - RNA, 22 nt, Artificial Sequence
  Synthesized RNAi sequence
ucuuccgugaagucauauuuua

SEQ ID NO: 12001 - RNA, 22 nt, Artificial Sequence
  Synthesized RNAi sequence
ucuucguccuuuucuuggaagc

SEQ ID NO: 12002 - RNA, 22 nt, Artificial Sequence
  Synthesized RNAi sequence
ucuugauccucauaacucauug

SEQ ID NO: 12003 - RNA, 22 nt, Artificial Sequence
  Synthesized RNAi sequence
ucuugauuaucuaaugucagua

SEQ ID NO: 12004 - RNA, 22 nt, Artificial Sequence
  Synthesized RNAi sequence
ucuuuaugcuagccacuagacc

SEQ ID NO: 12005 - RNA, 22 nt, Artificial Sequence
  Synthesized RNAi sequence
ucuuugcacuaauggcauacuu

SEQ ID NO: 12006 - RNA, 22 nt, Artificial Sequence
  Synthesized RNAi sequence
ugaaaagcaacauuguuaguaa

SEQ ID NO: 12007 - RNA, 22 nt, Artificial Sequence
  Synthesized RNAi sequence
ugaaacacacaacagcaucguc

SEQ ID NO: 12008 - RNA, 22 nt, Artificial Sequence
  Synthesized RNAi sequence
ugaaacuacaaauggaacacca

SEQ ID NO: 12009 - RNA, 22 nt, Artificial Sequence
  Synthesized RNAi sequence
ugaaagacaucagcauacuccu

SEQ ID NO: 12010 - RNA, 22 nt, Artificial Sequence
  Synthesized RNAi sequence
ugaaccgccacacaugaccauu

SEQ ID NO: 12011 - RNA, 22 nt, Artificial Sequence
  Synthesized RNAi sequence
ugaagucauauuuuaacaaauc

SEQ ID NO: 12012 - RNA, 22 nt, Artificial Sequence
  Synthesized RNAi sequence
ugaagugguauccaguugaaac

SEQ ID NO: 12013 - RNA, 22 nt, Artificial Sequence
  Synthesized RNAi sequence
ugaaguguuaucauuaguaagc

SEQ ID NO: 12014 - RNA, 22 nt, Artificial Sequence
  Synthesized RNAi sequence
ugaauaauaagaaucuacaaca

SEQ ID NO: 12015 - RNA, 22 nt, Artificial Sequence
  Synthesized RNAi sequence
ugaaucauaauaaagucuagcc

SEQ ID NO: 12016 - RNA, 22 nt, Artificial Sequence
  Synthesized RNAi sequence
ugacaagcuacaacacguugua

SEQ ID NO: 12017 - RNA, 22 nt, Artificial Sequence
  Synthesized RNAi sequence
ugacaguuugaaaagcaacauu

SEQ ID NO: 12018 - RNA, 22 nt, Artificial Sequence
  Synthesized RNAi sequence
ugacauuacguuuuguauaugc

SEQ ID NO: 12019 - RNA, 22 nt, Artificial Sequence
  Synthesized RNAi sequence
ugaccauuucacucaauacuug

SEQ ID NO: 12020 - RNA, 22 nt, Artificial Sequence
  Synthesized RNAi sequence
ugacgugauauaugugguacca

SEQ ID NO: 12021 - RNA, 22 nt, Artificial Sequence
  Synthesized RNAi sequence
ugacucugcaguuaaagcccug

SEQ ID NO: 12022 - RNA, 22 nt, Artificial Sequence
  Synthesized RNAi sequence
ugacuuaaaguucuuuaugcua

SEQ ID NO: 12023 - RNA, 22 nt, Artificial Sequence
  Synthesized RNAi sequence
ugacuugguuagcauuaauaca

SEQ ID NO: 12024 - RNA, 22 nt, Artificial Sequence
  Synthesized RNAi sequence
ugagaaauguuuacgcaaauau

SEQ ID NO: 12025 - RNA, 22 nt, Artificial Sequence
  Synthesized RNAi sequence
ugagagcaaaauucaugagguc

SEQ ID NO: 12026 - RNA, 22 nt, Artificial Sequence
  Synthesized RNAi sequence
ugagaucuugauuaucuaaugu

SEQ ID NO: 12027 - RNA, 22 nt, Artificial Sequence
  Synthesized RNAi sequence
ugagaugcauaagugcuauuga

SEQ ID NO: 12028 - RNA, 22 nt, Artificial Sequence
  Synthesized RNAi sequence
ugagcaaagaagaaguguuuua

SEQ ID NO: 12029 - RNA, 22 nt, Artificial Sequence
  Synthesized RNAi sequence
ugagcacacucauuagcuaauc

SEQ ID NO: 12030 - RNA, 22 nt, Artificial Sequence
  Synthesized RNAi sequence
ugaggccauaauucuaagcaug

SEQ ID NO: 12031 - RNA, 22 nt, Artificial Sequence
  Synthesized RNAi sequence
ugagguccuuuaguaaggucag

SEQ ID NO: 12032 - RNA, 22 nt, Artificial Sequence
  Synthesized RNAi sequence
ugagguuccaccugguuuaaca

SEQ ID NO: 12033 - RNA, 22 nt, Artificial Sequence
  Synthesized RNAi sequence
ugaguuauaguagggaugacau

SEQ ID NO: 12034 - RNA, 22 nt, Artificial Sequence
  Synthesized RNAi sequence
ugauagcagcauuaccauccug

SEQ ID NO: 12035 - RNA, 22 nt, Artificial Sequence
  Synthesized RNAi sequence
ugauauaugugguaccauguca

SEQ ID NO: 12036 - RNA, 22 nt, Artificial Sequence
  Synthesized RNAi sequence
ugauaucacacauuguugguag

SEQ ID NO: 12037 - RNA, 22 nt, Artificial Sequence
  Synthesized RNAi sequence
ugaugagguuccaccugguuua

SEQ ID NO: 12038 - RNA, 22 nt, Artificial Sequence
  Synthesized RNAi sequence
ugauggaucuggguaaggaagg

SEQ ID NO: 12039 - RNA, 22 nt, Artificial Sequence
  Synthesized RNAi sequence
ugauuaggauguuuaguaagug

SEQ ID NO: 12040 - RNA, 22 nt, Artificial Sequence
  Synthesized RNAi sequence
ugauuaucuaaugucaguacac

SEQ ID NO: 12041 - RNA, 22 nt, Artificial Sequence
  Synthesized RNAi sequence
ugauuauguacaacaccuagcu

SEQ ID NO: 12042 - RNA, 22 nt, Artificial Sequence
  Synthesized RNAi sequence
ugauuugucuagguuguugacg

SEQ ID NO: 12043 - RNA, 22 nt, Artificial Sequence
  Synthesized RNAi sequence
ugcaaagaacacaagccccaac

SEQ ID NO: 12044 - RNA, 22 nt, Artificial Sequence
  Synthesized RNAi sequence
ugcacaaugcagaaugcaucug

SEQ ID NO: 12045 - RNA, 22 nt, Artificial Sequence
  Synthesized RNAi sequence
ugcacuaauggcauacuuaaga

SEQ ID NO: 12046 - RNA, 22 nt, Artificial Sequence
  Synthesized RNAi sequence
ugcagaaugcaucugucaucca

SEQ ID NO: 12047 - RNA, 22 nt, Artificial Sequence
  Synthesized RNAi sequence
ugcagcuacugaaaagcacgua

SEQ ID NO: 12048 - RNA, 22 nt, Artificial Sequence
  Synthesized RNAi sequence
ugcaguuaaagcccuggucaag

SEQ ID NO: 12049 - RNA, 22 nt, Artificial Sequence
  Synthesized RNAi sequence
ugcauaagugcuauugaaacac

SEQ ID NO: 12050 - RNA, 22 nt, Artificial Sequence
  Synthesized RNAi sequence
ugcauagcagggucagcagcau

SEQ ID NO: 12051 - RNA, 22 nt, Artificial Sequence
  Synthesized RNAi sequence
ugcaucugucauccaaacaguu

SEQ ID NO: 12052 - RNA, 22 nt, Artificial Sequence
  Synthesized RNAi sequence
ugcaucuugauccucauaacuc

SEQ ID NO: 12053 - RNA, 22 nt, Artificial Sequence
  Synthesized RNAi sequence
ugcauuaacauuggccgugaca

SEQ ID NO: 12054 - RNA, 22 nt, Artificial Sequence
  Synthesized RNAi sequence
ugccauuguguauuuaguaaga

SEQ ID NO: 12055 - RNA, 22 nt, Artificial Sequence
  Synthesized RNAi sequence
ugccuuaaagcauagacgaggu

SEQ ID NO: 12056 - RNA, 22 nt, Artificial Sequence
  Synthesized RNAi sequence
ugcgaaaagugcaucuugaucc

SEQ ID NO: 12057 - RNA, 22 nt, Artificial Sequence
  Synthesized RNAi sequence
ugcgagcaagaacaagugaggc

SEQ ID NO: 12058 - RNA, 22 nt, Artificial Sequence
  Synthesized RNAi sequence
ugcgagcucuauucuuugcacu

SEQ ID NO: 12059 - RNA, 22 nt, Artificial Sequence
  Synthesized RNAi sequence
ugcgguguguacauagccucau

SEQ ID NO: 12060 - RNA, 22 nt, Artificial Sequence
  Synthesized RNAi sequence
ugcguaaaacucauucacaaag

SEQ ID NO: 12061 - RNA, 22 nt, Artificial Sequence
  Synthesized RNAi sequence
ugcguuuaucuaguaauagauu

SEQ ID NO: 12062 - RNA, 22 nt, Artificial Sequence
  Synthesized RNAi sequence
ugcuagccacuagaccuugaga

SEQ ID NO: 12063 - RNA, 22 nt, Artificial Sequence
  Synthesized RNAi sequence
ugcuauugaaacacacaacagc

SEQ ID NO: 12064 - RNA, 22 nt, Artificial Sequence
  Synthesized RNAi sequence
ugcuuguuccaauuacuacagu

SEQ ID NO: 12065 - RNA, 22 nt, Artificial Sequence
  Synthesized RNAi sequence
uggacaauccuuaaguaaauua

SEQ ID NO: 12066 - RNA, 22 nt, Artificial Sequence
  Synthesized RNAi sequence
uggaucuggguaaggaagguac

SEQ ID NO: 12067 - RNA, 22 nt, Artificial Sequence
  Synthesized RNAi sequence
uggcauacuuaagauucauuug

SEQ ID NO: 12068 - RNA, 22 nt, Artificial Sequence
  Synthesized RNAi sequence
uggcaucuccugaugagguucc

SEQ ID NO: 12069 - RNA, 22 nt, Artificial Sequence
  Synthesized RNAi sequence
uggcgugguuuguaugaaauca

SEQ ID NO: 12070 - RNA, 22 nt, Artificial Sequence
  Synthesized RNAi sequence
uggcucuaucacauuuaggaua

SEQ ID NO: 12071 - RNA, 22 nt, Artificial Sequence
  Synthesized RNAi sequence
ugggaacacuguagagaauaaa

SEQ ID NO: 12072 - RNA, 22 nt, Artificial Sequence
  Synthesized RNAi sequence
uggguaagcaucuauagcuaaa

SEQ ID NO: 12073 - RNA, 22 nt, Artificial Sequence
  Synthesized RNAi sequence
uggguaaggaagguacacauaa

SEQ ID NO: 12074 - RNA, 22 nt, Artificial Sequence
  Synthesized RNAi sequence
ugggugguaugucugaucccaa

SEQ ID NO: 12075 - RNA, 22 nt, Artificial Sequence
  Synthesized RNAi sequence
ugguaccaugucaccgucuauu

SEQ ID NO: 12076 - RNA, 22 nt, Artificial Sequence
  Synthesized RNAi sequence
ugguagauuauaacgauaguag

SEQ ID NO: 12077 - RNA, 22 nt, Artificial Sequence
  Synthesized RNAi sequence
ugguaguuagagaaaguguguc

SEQ ID NO: 12078 - RNA, 22 nt, Artificial Sequence
  Synthesized RNAi sequence
ugguauccaguugaaacuacaa

SEQ ID NO: 12079 - RNA, 22 nt, Artificial Sequence
  Synthesized RNAi sequence
ugguaugucugaucccaauauu

SEQ ID NO: 12080 - RNA, 22 nt, Artificial Sequence
  Synthesized RNAi sequence
uggucaagguuaauauaggcau

SEQ ID NO: 12081 - RNA, 22 nt, Artificial Sequence
  Synthesized RNAi sequence
uggucauaguacuacagauaga

SEQ ID NO: 12082 - RNA, 22 nt, Artificial Sequence
  Synthesized RNAi sequence
ugguuagcauuaauacagccac

SEQ ID NO: 12083 - RNA, 22 nt, Artificial Sequence
  Synthesized RNAi sequence
ugguuuaacauauagugaaccg

SEQ ID NO: 12084 - RNA, 22 nt, Artificial Sequence
  Synthesized RNAi sequence
ugguuuguaugaaaucaccgaa

SEQ ID NO: 12085 - RNA, 22 nt, Artificial Sequence
  Synthesized RNAi sequence
uguaaauugcggacauacuuau

SEQ ID NO: 12086 - RNA, 22 nt, Artificial Sequence
  Synthesized RNAi sequence
uguaagacuguaugcggugugu

SEQ ID NO: 12087 - RNA, 22 nt, Artificial Sequence
  Synthesized RNAi sequence
uguaaggcuuuguuaagucagu

SEQ ID NO: 12088 - RNA, 22 nt, Artificial Sequence
  Synthesized RNAi sequence
uguaaguacaaaugaaagacau

SEQ ID NO: 12089 - RNA, 22 nt, Artificial Sequence
  Synthesized RNAi sequence
uguaaguuuacauccugauuau

SEQ ID NO: 12090 - RNA, 22 nt, Artificial Sequence
  Synthesized RNAi sequence
uguacaacaccuagcucucuga

SEQ ID NO: 12091 - RNA, 22 nt, Artificial Sequence
  Synthesized RNAi sequence
uguacauagccucauaaaacuc

SEQ ID NO: 12092 - RNA, 22 nt, Artificial Sequence
  Synthesized RNAi sequence
uguagagaauaaaacauuaaag

SEQ ID NO: 12093 - RNA, 22 nt, Artificial Sequence
  Synthesized RNAi sequence
uguagaugucaaaagcccugua

SEQ ID NO: 12094 - RNA, 22 nt, Artificial Sequence
  Synthesized RNAi sequence
uguagcuuucuuauguauugua

SEQ ID NO: 12095 - RNA, 22 nt, Artificial Sequence
  Synthesized RNAi sequence
uguaggugggaacacuguagag

SEQ ID NO: 12096 - RNA, 22 nt, Artificial Sequence
  Synthesized RNAi sequence
uguauacgacaucaguacuagu

SEQ ID NO: 12097 - RNA, 22 nt, Artificial Sequence
  Synthesized RNAi sequence
uguauaugcgaaaagugcaucu

SEQ ID NO: 12098 - RNA, 22 nt, Artificial Sequence
  Synthesized RNAi sequence
uguaugaaaucaccgaaaucau

SEQ ID NO: 12099 - RNA, 22 nt, Artificial Sequence
  Synthesized RNAi sequence
uguaugcgguguguacauagcc

SEQ ID NO: 12100 - RNA, 22 nt, Artificial Sequence
  Synthesized RNAi sequence
uguauguugagagcaaaauuca

SEQ ID NO: 12101 - RNA, 22 nt, Artificial Sequence
  Synthesized RNAi sequence
uguauguuugcgagcaagaaca

SEQ ID NO: 12102 - RNA, 22 nt, Artificial Sequence
  Synthesized RNAi sequence
uguauuguaaguacaaaugaaa

SEQ ID NO: 12103 - RNA, 22 nt, Artificial Sequence
  Synthesized RNAi sequence
uguauuuaguaagacguugacg

SEQ ID NO: 12104 - RNA, 22 nt, Artificial Sequence
  Synthesized RNAi sequence
ugucaaaagcccuguauacgac

SEQ ID NO: 12105 - RNA, 22 nt, Artificial Sequence
  Synthesized RNAi sequence
ugucaacaucucuauuucuaua

SEQ ID NO: 12106 - RNA, 22 nt, Artificial Sequence
  Synthesized RNAi sequence
ugucaacaugugacucugcagu

SEQ ID NO: 12107 - RNA, 22 nt, Artificial Sequence
  Synthesized RNAi sequence
ugucacaauuaccuucaucaaa

SEQ ID NO: 12108 - RNA, 22 nt, Artificial Sequence
  Synthesized RNAi sequence
ugucaccgucuauucuaaacuu

SEQ ID NO: 12109 - RNA, 22 nt, Artificial Sequence
  Synthesized RNAi sequence
ugucaguacaccaacaauacca

SEQ ID NO: 12110 - RNA, 22 nt, Artificial Sequence
  Synthesized RNAi sequence
ugucauccaaacaguuaacaca

SEQ ID NO: 12111 - RNA, 22 nt, Artificial Sequence
  Synthesized RNAi sequence
ugucaucuucguccuuuucuug

SEQ ID NO: 12112 - RNA, 22 nt, Artificial Sequence
  Synthesized RNAi sequence
uguccuguuaacucaucaugua

SEQ ID NO: 12113 - RNA, 22 nt, Artificial Sequence
  Synthesized RNAi sequence
ugucuaacauguguccuguuaa

SEQ ID NO: 12114 - RNA, 22 nt, Artificial Sequence
  Synthesized RNAi sequence
ugucucuuaacuacaaaguaag

SEQ ID NO: 12115 - RNA, 22 nt, Artificial Sequence
  Synthesized RNAi sequence
ugucugauaucacacauuguug

SEQ ID NO: 12116 - RNA, 22 nt, Artificial Sequence
  Synthesized RNAi sequence
ugucugaucccaauauuuaaaa

SEQ ID NO: 12117 - RNA, 22 nt, Artificial Sequence
  Synthesized RNAi sequence
ugugaauugcaaagaacacaag

SEQ ID NO: 12118 - RNA, 22 nt, Artificial Sequence
  Synthesized RNAi sequence
ugugacaagcuacaacacguug

SEQ ID NO: 12119 - RNA, 22 nt, Artificial Sequence
  Synthesized RNAi sequence
ugugacucugcaguuaaagccc

SEQ ID NO: 12120 - RNA, 22 nt, Artificial Sequence
  Synthesized RNAi sequence
uguggcaucuccugaugagguu

SEQ ID NO: 12121 - RNA, 22 nt, Artificial Sequence
  Synthesized RNAi sequence
ugugguaccaugucaccgucua

SEQ ID NO: 12122 - RNA, 22 nt, Artificial Sequence
  Synthesized RNAi sequence
uguguacauagccucauaaaac

SEQ ID NO: 12123 - RNA, 22 nt, Artificial Sequence
  Synthesized RNAi sequence
uguguauuuaguaagacguuga

SEQ ID NO: 12124 - RNA, 22 nt, Artificial Sequence
  Synthesized RNAi sequence
ugugucaacaucucuauuucua

SEQ ID NO: 12125 - RNA, 22 nt, Artificial Sequence
  Synthesized RNAi sequence
ugugucacaauuaccuucauca

SEQ ID NO: 12126 - RNA, 22 nt, Artificial Sequence
  Synthesized RNAi sequence
uguguccuguuaacucaucaug

SEQ ID NO: 12127 - RNA, 22 nt, Artificial Sequence
  Synthesized RNAi sequence
ugugucucuuaacuacaaagua

SEQ ID NO: 12128 - RNA, 22 nt, Artificial Sequence
  Synthesized RNAi sequence
uguguuguaaauugcggacaua

SEQ ID NO: 12129 - RNA, 22 nt, Artificial Sequence
  Synthesized RNAi sequence
uguuaaaauuaccggguuugac

SEQ ID NO: 12130 - RNA, 22 nt, Artificial Sequence
  Synthesized RNAi sequence
uguuaacucaucauguagcuuu

SEQ ID NO: 12131 - RNA, 22 nt, Artificial Sequence
  Synthesized RNAi sequence
uguuaagucagugucaacaugu

SEQ ID NO: 12132 - RNA, 22 nt, Artificial Sequence
  Synthesized RNAi sequence
uguuaccaucaguagauaaaag

SEQ ID NO: 12133 - RNA, 22 nt, Artificial Sequence
  Synthesized RNAi sequence
uguuaggcauggcucuaucaca

SEQ ID NO: 12134 - RNA, 22 nt, Artificial Sequence
  Synthesized RNAi sequence
uguuaguaagugcagcuacuga

SEQ ID NO: 12135 - RNA, 22 nt, Artificial Sequence
  Synthesized RNAi sequence
uguuaucauuaguaagcauaac

SEQ ID NO: 12136 - RNA, 22 nt, Artificial Sequence
  Synthesized RNAi sequence
uguuccaauuacuacaguagcu

SEQ ID NO: 12137 - RNA, 22 nt, Artificial Sequence
  Synthesized RNAi sequence
uguugacgaugacuugguuagc

SEQ ID NO: 12138 - RNA, 22 nt, Artificial Sequence
  Synthesized RNAi sequence
uguugagagcaaaauucaugag

SEQ ID NO: 12139 - RNA, 22 nt, Artificial Sequence
  Synthesized RNAi sequence
uguugguagauuauaacgauag

SEQ ID NO: 12140 - RNA, 22 nt, Artificial Sequence
  Synthesized RNAi sequence
uguugguaguuagagaaagugu

SEQ ID NO: 12141 - RNA, 22 nt, Artificial Sequence
  Synthesized RNAi sequence
uguuguaaauugcggacauacu

SEQ ID NO: 12142 - RNA, 22 nt, Artificial Sequence
  Synthesized RNAi sequence
uguuuaacuagcauuguauguu

SEQ ID NO: 12143 - RNA, 22 nt, Artificial Sequence
  Synthesized RNAi sequence
uguuuacgcaaauaugcguaaa

SEQ ID NO: 12144 - RNA, 22 nt, Artificial Sequence
  Synthesized RNAi sequence
uguuuaguaaguggguaagcau

SEQ ID NO: 12145 - RNA, 22 nt, Artificial Sequence
  Synthesized RNAi sequence
uguuugcgagcaagaacaagug

SEQ ID NO: 12146 - RNA, 22 nt, Artificial Sequence
  Synthesized RNAi sequence
uguuuuaauucaacagaacuuc

SEQ ID NO: 12147 - RNA, 22 nt, Artificial Sequence
  Synthesized RNAi sequence
uuaaaacuaagucuagagcuau

SEQ ID NO: 12148 - RNA, 22 nt, Artificial Sequence
  Synthesized RNAi sequence
uuaaaauuaccggguuugacag

SEQ ID NO: 12149 - RNA, 22 nt, Artificial Sequence
  Synthesized RNAi sequence
uuaaagaaacccuuagacacag

SEQ ID NO: 12150 - RNA, 22 nt, Artificial Sequence
  Synthesized RNAi sequence
uuaaagaagucauguuuagcaa

SEQ ID NO: 12151 - RNA, 22 nt, Artificial Sequence
  Synthesized RNAi sequence
uuaaagcauagacgaggucugc

SEQ ID NO: 12152 - RNA, 22 nt, Artificial Sequence
  Synthesized RNAi sequence
uuaaagcccuggucaagguuaa

SEQ ID NO: 12153 - RNA, 22 nt, Artificial Sequence
  Synthesized RNAi sequence
uuaaaguucuuuaugcuagcca

SEQ ID NO: 12154 - RNA, 22 nt, Artificial Sequence
  Synthesized RNAi sequence
uuaaauggaaaaccagcugauu

SEQ ID NO: 12155 - RNA, 22 nt, Artificial Sequence
  Synthesized RNAi sequence
uuaaauugucaucuucguccuu

SEQ ID NO: 12156 - RNA, 22 nt, Artificial Sequence
  Synthesized RNAi sequence
uuaacaaaucccacuuaaugua

SEQ ID NO: 12157 - RNA, 22 nt, Artificial Sequence
  Synthesized RNAi sequence
uuaacacaauuugggugguaug

SEQ ID NO: 12158 - RNA, 22 nt, Artificial Sequence
  Synthesized RNAi sequence
uuaacauauagugaaccgccac

SEQ ID NO: 12159 - RNA, 22 nt, Artificial Sequence
  Synthesized RNAi sequence
uuaacuacaaaguaagaaucaa

SEQ ID NO: 12160 - RNA, 22 nt, Artificial Sequence
  Synthesized RNAi sequence
uuaacuagcauuguauguugag

SEQ ID NO: 12161 - RNA, 22 nt, Artificial Sequence
  Synthesized RNAi sequence
uuaacucaucauguagcuuucu

SEQ ID NO: 12162 - RNA, 22 nt, Artificial Sequence
  Synthesized RNAi sequence
uuaagauucauuugaguuauag

SEQ ID NO: 12163 - RNA, 22 nt, Artificial Sequence
  Synthesized RNAi sequence
uuaagucagugucaacauguga

SEQ ID NO: 12164 - RNA, 22 nt, Artificial Sequence
  Synthesized RNAi sequence
uuaauacagccaccaucguaac

SEQ ID NO: 12165 - RNA, 22 nt, Artificial Sequence
  Synthesized RNAi sequence
uuaauauaggcauuaacaauga

SEQ ID NO: 12166 - RNA, 22 nt, Artificial Sequence
  Synthesized RNAi sequence
uuaauguaaggcuuuguuaagu

SEQ ID NO: 12167 - RNA, 22 nt, Artificial Sequence
  Synthesized RNAi sequence
uuaaugugucacaauuaccuuc

SEQ ID NO: 12168 - RNA, 22 nt, Artificial Sequence
  Synthesized RNAi sequence
uuaauucaacagaacuuccuuc

SEQ ID NO: 12169 - RNA, 22 nt, Artificial Sequence
  Synthesized RNAi sequence
uuacauccugauuauguacaac

SEQ ID NO: 12170 - RNA, 22 nt, Artificial Sequence
  Synthesized RNAi sequence
uuaccagaagcagcgugcauag

SEQ ID NO: 12171 - RNA, 22 nt, Artificial Sequence
  Synthesized RNAi sequence
uuaccaucaguagauaaaagug

SEQ ID NO: 12172 - RNA, 22 nt, Artificial Sequence
  Synthesized RNAi sequence
uuaccauccugagcaaagaaga

SEQ ID NO: 12173 - RNA, 22 nt, Artificial Sequence
  Synthesized RNAi sequence
uuaccauugagaucuugauuau

SEQ ID NO: 12174 - RNA, 22 nt, Artificial Sequence
  Synthesized RNAi sequence
uuaccccauuuauuaaauggaa

SEQ ID NO: 12175 - RNA, 22 nt, Artificial Sequence
  Synthesized RNAi sequence
uuaccggguuugacaguuugaa

SEQ ID NO: 12176 - RNA, 22 nt, Artificial Sequence
  Synthesized RNAi sequence
uuaccuucaucaaaaugccuua

SEQ ID NO: 12177 - RNA, 22 nt, Artificial Sequence
  Synthesized RNAi sequence
uuacgcaaauaugcguaaaacu

SEQ ID NO: 12178 - RNA, 22 nt, Artificial Sequence
  Synthesized RNAi sequence
uuacguuuuguauaugcgaaaa

SEQ ID NO: 12179 - RNA, 22 nt, Artificial Sequence
  Synthesized RNAi sequence
uuacuacaguagcuccucuagu

SEQ ID NO: 12180 - RNA, 22 nt, Artificial Sequence
  Synthesized RNAi sequence
uuagagaaagugugucucuuaa

SEQ ID NO: 12181 - RNA, 22 nt, Artificial Sequence
  Synthesized RNAi sequence
uuagcaacagcuggacaauccu

SEQ ID NO: 12182 - RNA, 22 nt, Artificial Sequence
  Synthesized RNAi sequence
uuagcauuaauacagccaccau

SEQ ID NO: 12183 - RNA, 22 nt, Artificial Sequence
  Synthesized RNAi sequence
uuagcuaaucuauagaaacggu

SEQ ID NO: 12184 - RNA, 22 nt, Artificial Sequence
  Synthesized RNAi sequence
uuaggauaaucccaacccauaa

SEQ ID NO: 12185 - RNA, 22 nt, Artificial Sequence
  Synthesized RNAi sequence
uuaggauguuuaguaagugggu

SEQ ID NO: 12186 - RNA, 22 nt, Artificial Sequence
  Synthesized RNAi sequence
uuaggcauggcucuaucacauu

SEQ ID NO: 12187 - RNA, 22 nt, Artificial Sequence
  Synthesized RNAi sequence
uuaguaagacguugacgugaua

SEQ ID NO: 12188 - RNA, 22 nt, Artificial Sequence
  Synthesized RNAi sequence
uuaguaaggucagucucagucc

SEQ ID NO: 12189 - RNA, 22 nt, Artificial Sequence
  Synthesized RNAi sequence
uuaguaagugcagcuacugaaa

SEQ ID NO: 12190 - RNA, 22 nt, Artificial Sequence
  Synthesized RNAi sequence
uuaguaaguggguaagcaucua

SEQ ID NO: 12191 - RNA, 22 nt, Artificial Sequence
  Synthesized RNAi sequence
uuauaacgauaguagucauaau

SEQ ID NO: 12192 - RNA, 22 nt, Artificial Sequence
  Synthesized RNAi sequence
uuauaguagggaugacauuacg

SEQ ID NO: 12193 - RNA, 22 nt, Artificial Sequence
  Synthesized RNAi sequence
uuaucaacaacuucaacuacaa

SEQ ID NO: 12194 - RNA, 22 nt, Artificial Sequence
  Synthesized RNAi sequence
uuaucauuaguaagcauaacag

SEQ ID NO: 12195 - RNA, 22 nt, Artificial Sequence
  Synthesized RNAi sequence
uuaucauuguagaugucaaaag

SEQ ID NO: 12196 - RNA, 22 nt, Artificial Sequence
  Synthesized RNAi sequence
uuaucggcaauuuuguuaccau

SEQ ID NO: 12197 - RNA, 22 nt, Artificial Sequence
  Synthesized RNAi sequence
uuaucuaaugucaguacaccaa

SEQ ID NO: 12198 - RNA, 22 nt, Artificial Sequence
  Synthesized RNAi sequence
uuaucuaguaauagauuaccag

SEQ ID NO: 12199 - RNA, 22 nt, Artificial Sequence
  Synthesized RNAi sequence
uuaugcuagccacuagaccuug

SEQ ID NO: 12200 - RNA, 22 nt, Artificial Sequence
  Synthesized RNAi sequence
uuauguacaacaccuagcucuc

SEQ ID NO: 12201 - RNA, 22 nt, Artificial Sequence
  Synthesized RNAi sequence
uuauguauuguaaguacaaaug

SEQ ID NO: 12202 - RNA, 22 nt, Artificial Sequence
  Synthesized RNAi sequence
uuauuaaauggaaaaccagcug

SEQ ID NO: 12203 - RNA, 22 nt, Artificial Sequence
  Synthesized RNAi sequence
uucaacagaacuuccuuccuua

SEQ ID NO: 12204 - RNA, 22 nt, Artificial Sequence
  Synthesized RNAi sequence
uucaacuacaaauaguaguugu

SEQ ID NO: 12205 - RNA, 22 nt, Artificial Sequence
  Synthesized RNAi sequence
uucacaaagucugugucaacau

SEQ ID NO: 12206 - RNA, 22 nt, Artificial Sequence
  Synthesized RNAi sequence
uucacucaauacuugagcacac

SEQ ID NO: 12207 - RNA, 22 nt, Artificial Sequence
  Synthesized RNAi sequence
uucaucaaaaugccuuaaagca

SEQ ID NO: 12208 - RNA, 22 nt, Artificial Sequence
  Synthesized RNAi sequence
uucaugagguccuuuaguaagg

SEQ ID NO: 12209 - RNA, 22 nt, Artificial Sequence
  Synthesized RNAi sequence
uucauguugguaguuagagaaa

SEQ ID NO: 12210 - RNA, 22 nt, Artificial Sequence
  Synthesized RNAi sequence
uucauuugaguuauaguaggga

SEQ ID NO: 12211 - RNA, 22 nt, Artificial Sequence
  Synthesized RNAi sequence
uuccaauuacuacaguagcucc

SEQ ID NO: 12212 - RNA, 22 nt, Artificial Sequence
  Synthesized RNAi sequence
uuccaccugguuuaacauauag

SEQ ID NO: 12213 - RNA, 22 nt, Artificial Sequence
  Synthesized RNAi sequence
uucccaauaccuugaaguguua

SEQ ID NO: 12214 - RNA, 22 nt, Artificial Sequence
  Synthesized RNAi sequence
uuccgugaagucauauuuuaac

SEQ ID NO: 12215 - RNA, 22 nt, Artificial Sequence
  Synthesized RNAi sequence
uuccuuaaaacuaagucuagag

SEQ ID NO: 12216 - RNA, 22 nt, Artificial Sequence
  Synthesized RNAi sequence
uuccuuaaagaaacccuuagac

SEQ ID NO: 12217 - RNA, 22 nt, Artificial Sequence
  Synthesized RNAi sequence
uuccuuccuuaaagaaacccuu

SEQ ID NO: 12218 - RNA, 22 nt, Artificial Sequence
  Synthesized RNAi sequence
uucguccuuuucuuggaagcga

SEQ ID NO: 12219 - RNA, 22 nt, Artificial Sequence
  Synthesized RNAi sequence
uucuaaacuuaaagaagucaug

SEQ ID NO: 12220 - RNA, 22 nt, Artificial Sequence
  Synthesized RNAi sequence
uucuaagcauguuaggcauggc

SEQ ID NO: 12221 - RNA, 22 nt, Artificial Sequence
  Synthesized RNAi sequence
uucuauagagacacucauaaag

SEQ ID NO: 12222 - RNA, 22 nt, Artificial Sequence
  Synthesized RNAi sequence
uucuuauguauuguaaguacaa

SEQ ID NO: 12223 - RNA, 22 nt, Artificial Sequence
  Synthesized RNAi sequence
uucuucauguugguaguuagag

SEQ ID NO: 12224 - RNA, 22 nt, Artificial Sequence
  Synthesized RNAi sequence
uucuugauggaucuggguaagg

SEQ ID NO: 12225 - RNA, 22 nt, Artificial Sequence
  Synthesized RNAi sequence
uucuuuaugcuagccacuagac

SEQ ID NO: 12226 - RNA, 22 nt, Artificial Sequence
  Synthesized RNAi sequence
uucuuugcacuaauggcauacu

SEQ ID NO: 12227 - RNA, 22 nt, Artificial Sequence
  Synthesized RNAi sequence
uugaaaagcaacauuguuagua

SEQ ID NO: 12228 - RNA, 22 nt, Artificial Sequence
  Synthesized RNAi sequence
uugaaacacacaacagcaucgu

SEQ ID NO: 12229 - RNA, 22 nt, Artificial Sequence
  Synthesized RNAi sequence
uugaaacuacaaauggaacacc

SEQ ID NO: 12230 - RNA, 22 nt, Artificial Sequence
  Synthesized RNAi sequence
uugaaguguuaucauuaguaag

SEQ ID NO: 12231 - RNA, 22 nt, Artificial Sequence
  Synthesized RNAi sequence
uugaaucauaauaaagucuagc

SEQ ID NO: 12232 - RNA, 22 nt, Artificial Sequence
  Synthesized RNAi sequence
uugacaguuugaaaagcaacau

SEQ ID NO: 12233 - RNA, 22 nt, Artificial Sequence
  Synthesized RNAi sequence
uugacgaugacuugguuagcau

SEQ ID NO: 12234 - RNA, 22 nt, Artificial Sequence
  Synthesized RNAi sequence
uugacgugauauaugugguacc

SEQ ID NO: 12235 - RNA, 22 nt, Artificial Sequence
  Synthesized RNAi sequence
uugagaaauguuuacgcaaaua

SEQ ID NO: 12236 - RNA, 22 nt, Artificial Sequence
  Synthesized RNAi sequence
uugagagcaaaauucaugaggu

SEQ ID NO: 12237 - RNA, 22 nt, Artificial Sequence
  Synthesized RNAi sequence
uugagaucuugauuaucuaaug

SEQ ID NO: 12238 - RNA, 22 nt, Artificial Sequence
  Synthesized RNAi sequence
uugagaugcauaagugcuauug

SEQ ID NO: 12239 - RNA, 22 nt, Artificial Sequence
  Synthesized RNAi sequence
uugagcacacucauuagcuaau

SEQ ID NO: 12240 - RNA, 22 nt, Artificial Sequence
  Synthesized RNAi sequence
uugaguuauaguagggaugaca

SEQ ID NO: 12241 - RNA, 22 nt, Artificial Sequence
  Synthesized RNAi sequence
uugauggaucuggguaaggaag

SEQ ID NO: 12242 - RNA, 22 nt, Artificial Sequence
  Synthesized RNAi sequence
uugauuaucuaaugucaguaca

SEQ ID NO: 12243 - RNA, 22 nt, Artificial Sequence
  Synthesized RNAi sequence
uugcaaagaacacaagccccaa

SEQ ID NO: 12244 - RNA, 22 nt, Artificial Sequence
  Synthesized RNAi sequence
uugcacaaugcagaaugcaucu

SEQ ID NO: 12245 - RNA, 22 nt, Artificial Sequence
  Synthesized RNAi sequence
uugcacuaauggcauacuuaag

SEQ ID NO: 12246 - RNA, 22 nt, Artificial Sequence
  Synthesized RNAi sequence
uugcgagcaagaacaagugagg

SEQ ID NO: 12247 - RNA, 22 nt, Artificial Sequence
  Synthesized RNAi sequence
uugcggacauacuuaucggcaa

SEQ ID NO: 12248 - RNA, 22 nt, Artificial Sequence
  Synthesized RNAi sequence
uugcuuguuccaauuacuacag

SEQ ID NO: 12249 - RNA, 22 nt, Artificial Sequence
  Synthesized RNAi sequence
uugggugguaugucugauccca

SEQ ID NO: 12250 - RNA, 22 nt, Artificial Sequence
  Synthesized RNAi sequence
uugguagauuauaacgauagua

SEQ ID NO: 12251 - RNA, 22 nt, Artificial Sequence
  Synthesized RNAi sequence
uugguaguuagagaaagugugu

SEQ ID NO: 12252 - RNA, 22 nt, Artificial Sequence
  Synthesized RNAi sequence
uuggucauaguacuacagauag

SEQ ID NO: 12253 - RNA, 22 nt, Artificial Sequence
  Synthesized RNAi sequence
uugguuagcauuaauacagcca

SEQ ID NO: 12254 - RNA, 22 nt, Artificial Sequence
  Synthesized RNAi sequence
uuguaaauugcggacauacuua

SEQ ID NO: 12255 - RNA, 22 nt, Artificial Sequence
  Synthesized RNAi sequence
uuguaaguacaaaugaaagaca

SEQ ID NO: 12256 - RNA, 22 nt, Artificial Sequence
  Synthesized RNAi sequence
uuguagaugucaaaagcccugu

SEQ ID NO: 12257 - RNA, 22 nt, Artificial Sequence
  Synthesized RNAi sequence
uuguaggugggaacacuguaga

SEQ ID NO: 12258 - RNA, 22 nt, Artificial Sequence
  Synthesized RNAi sequence
uuguauaugcgaaaagugcauc

SEQ ID NO: 12259 - RNA, 22 nt, Artificial Sequence
  Synthesized RNAi sequence
uuguaugaaaucaccgaaauca

SEQ ID NO: 12260 - RNA, 22 nt, Artificial Sequence
  Synthesized RNAi sequence
uuguauguugagagcaaaauuc

SEQ ID NO: 12261 - RNA, 22 nt, Artificial Sequence
  Synthesized RNAi sequence
uuguauguuugcgagcaagaac

SEQ ID NO: 12262 - RNA, 22 nt, Artificial Sequence
  Synthesized RNAi sequence
uugucaucuucguccuuuucuu

SEQ ID NO: 12263 - RNA, 22 nt, Artificial Sequence
  Synthesized RNAi sequence
uugucuagguuguugacgauga

SEQ ID NO: 12264 - RNA, 22 nt, Artificial Sequence
  Synthesized RNAi sequence
uugucugauaucacacauuguu

SEQ ID NO: 12265 - RNA, 22 nt, Artificial Sequence
  Synthesized RNAi sequence
uuguggcaucuccugaugaggu

SEQ ID NO: 12266 - RNA, 22 nt, Artificial Sequence
  Synthesized RNAi sequence
uuguguauuuaguaagacguug

SEQ ID NO: 12267 - RNA, 22 nt, Artificial Sequence
  Synthesized RNAi sequence
uuguuaaaauuaccggguuuga

SEQ ID NO: 12268 - RNA, 22 nt, Artificial Sequence
  Synthesized RNAi sequence
uuguuaagucagugucaacaug

SEQ ID NO: 12269 - RNA, 22 nt, Artificial Sequence
  Synthesized RNAi sequence
uuguuaccaucaguagauaaaa

SEQ ID NO: 12270 - RNA, 22 nt, Artificial Sequence
  Synthesized RNAi sequence
uuguuaguaagugcagcuacug

SEQ ID NO: 12271 - RNA, 22 nt, Artificial Sequence
  Synthesized RNAi sequence
uuguuccaauuacuacaguagc

SEQ ID NO: 12272 - RNA, 22 nt, Artificial Sequence
  Synthesized RNAi sequence
uuguugacgaugacuugguuag

SEQ ID NO: 12273 - RNA, 22 nt, Artificial Sequence
  Synthesized RNAi sequence
uuguugguagauuauaacgaua

SEQ ID NO: 12274 - RNA, 22 nt, Artificial Sequence
  Synthesized RNAi sequence
uuguuucuucauguugguaguu

SEQ ID NO: 12275 - RNA, 22 nt, Artificial Sequence
  Synthesized RNAi sequence
uuuaaaauaacggucaaagagu

SEQ ID NO: 12276 - RNA, 22 nt, Artificial Sequence
  Synthesized RNAi sequence
uuuaacaaaucccacuuaaugu

SEQ ID NO: 12277 - RNA, 22 nt, Artificial Sequence
  Synthesized RNAi sequence
uuuaacauauagugaaccgcca

SEQ ID NO: 12278 - RNA, 22 nt, Artificial Sequence
  Synthesized RNAi sequence
uuuaacuagcauuguauguuga

SEQ ID NO: 12279 - RNA, 22 nt, Artificial Sequence
  Synthesized RNAi sequence
uuuaaugugucacaauuaccuu

SEQ ID NO: 12280 - RNA, 22 nt, Artificial Sequence
  Synthesized RNAi sequence
uuuaauucaacagaacuuccuu

SEQ ID NO: 12281 - RNA, 22 nt, Artificial Sequence
  Synthesized RNAi sequence
uuuacauccugauuauguacaa

SEQ ID NO: 12282 - RNA, 22 nt, Artificial Sequence
  Synthesized RNAi sequence
uuuacgcaaauaugcguaaaac

SEQ ID NO: 12283 - RNA, 22 nt, Artificial Sequence
  Synthesized RNAi sequence
uuuagcaacagcuggacaaucc

SEQ ID NO: 12284 - RNA, 22 nt, Artificial Sequence
  Synthesized RNAi sequence
uuuaggauaaucccaacccaua

SEQ ID NO: 12285 - RNA, 22 nt, Artificial Sequence
  Synthesized RNAi sequence
uuuaguaagacguugacgugau

SEQ ID NO: 12286 - RNA, 22 nt, Artificial Sequence
  Synthesized RNAi sequence
uuuaguaaguggguaagcaucu

SEQ ID NO: 12287 - RNA, 22 nt, Artificial Sequence
  Synthesized RNAi sequence
uuuaucauuguagaugucaaaa

SEQ ID NO: 12288 - RNA, 22 nt, Artificial Sequence
  Synthesized RNAi sequence
uuuaucuaguaauagauuacca

SEQ ID NO: 12289 - RNA, 22 nt, Artificial Sequence
  Synthesized RNAi sequence
uuuaugcuagccacuagaccuu

SEQ ID NO: 12290 - RNA, 22 nt, Artificial Sequence
  Synthesized RNAi sequence
uuuauuaaauggaaaaccagcu

SEQ ID NO: 12291 - RNA, 22 nt, Artificial Sequence
  Synthesized RNAi sequence
uuucacucaauacuugagcaca

SEQ ID NO: 12292 - RNA, 22 nt, Artificial Sequence
  Synthesized RNAi sequence
uuucuauagagacacucauaaa

SEQ ID NO: 12293 - RNA, 22 nt, Artificial Sequence
  Synthesized RNAi sequence
uuucuuauguauuguaaguaca

SEQ ID NO: 12294 - RNA, 22 nt, Artificial Sequence
  Synthesized RNAi sequence
uuucuucauguugguaguuaga

SEQ ID NO: 12295 - RNA, 22 nt, Artificial Sequence
  Synthesized RNAi sequence
uuugaaaagcaacauuguuagu

SEQ ID NO: 12296 - RNA, 22 nt, Artificial Sequence
  Synthesized RNAi sequence
uuugacaguuugaaaagcaaca

SEQ ID NO: 12297 - RNA, 22 nt, Artificial Sequence
  Synthesized RNAi sequence
uuugaguuauaguagggaugac

SEQ ID NO: 12298 - RNA, 22 nt, Artificial Sequence
  Synthesized RNAi sequence
uuugcacaaugcagaaugcauc

SEQ ID NO: 12299 - RNA, 22 nt, Artificial Sequence
  Synthesized RNAi sequence
uuugcacuaauggcauacuuaa

SEQ ID NO: 12300 - RNA, 22 nt, Artificial Sequence
  Synthesized RNAi sequence
uuugcgagcaagaacaagugag

SEQ ID NO: 12301 - RNA, 22 nt, Artificial Sequence
  Synthesized RNAi sequence
uuugcuuguuccaauuacuaca

SEQ ID NO: 12302 - RNA, 22 nt, Artificial Sequence
  Synthesized RNAi sequence
uuugggugguaugucugauccc

SEQ ID NO: 12303 - RNA, 22 nt, Artificial Sequence
  Synthesized RNAi sequence
uuuguauaugcgaaaagugcau

SEQ ID NO: 12304 - RNA, 22 nt, Artificial Sequence
  Synthesized RNAi sequence
uuuguaugaaaucaccgaaauc

SEQ ID NO: 12305 - RNA, 22 nt, Artificial Sequence
  Synthesized RNAi sequence
uuugucuagguuguugacgaug

SEQ ID NO: 12306 - RNA, 22 nt, Artificial Sequence
  Synthesized RNAi sequence
uuuguuaaaauuaccggguuug

SEQ ID NO: 12307 - RNA, 22 nt, Artificial Sequence
  Synthesized RNAi sequence
uuuguuaagucagugucaacau

SEQ ID NO: 12308 - RNA, 22 nt, Artificial Sequence
  Synthesized RNAi sequence
uuuguuaccaucaguagauaaa

SEQ ID NO: 12309 - RNA, 22 nt, Artificial Sequence
  Synthesized RNAi sequence
uuuuaaccucucuuccgugaag

SEQ ID NO: 12310 - RNA, 22 nt, Artificial Sequence
  Synthesized RNAi sequence
uuuuaaugugucacaauuaccu

SEQ ID NO: 12311 - RNA, 22 nt, Artificial Sequence
  Synthesized RNAi sequence
uuuuaauucaacagaacuuccu

SEQ ID NO: 12312 - RNA, 22 nt, Artificial Sequence
  Synthesized RNAi sequence
uuuuguuaccaucaguagauaa

SEQ ID NO: 12313 - RNA, 22 nt, Artificial Sequence
  Synthesized RNAi sequence
aaacaaagacaccuucacgagg

SEQ ID NO: 12314 - RNA, 22 nt, Artificial Sequence
  Synthesized RNAi sequence
aaacaaauccauaaguucguuu

SEQ ID NO: 12315 - RNA, 22 nt, Artificial Sequence
  Synthesized RNAi sequence
aaacaccacgugugaaagaauu

SEQ ID NO: 12316 - RNA, 22 nt, Artificial Sequence
  Synthesized RNAi sequence
aaacaccaucauuaaaugguag

SEQ ID NO: 12317 - RNA, 22 nt, Artificial Sequence
  Synthesized RNAi sequence
aaacacgccaaguaggaguaag

SEQ ID NO: 12318 - RNA, 22 nt, Artificial Sequence
  Synthesized RNAi sequence
aaacacuugaaauugcaccaaa

SEQ ID NO: 12319 - RNA, 22 nt, Artificial Sequence
  Synthesized RNAi sequence
aaacaguaaggccguuaaacuu

SEQ ID NO: 12320 - RNA, 22 nt, Artificial Sequence
  Synthesized RNAi sequence
aaaccagugugugccauuugaa

SEQ ID NO: 12321 - RNA, 22 nt, Artificial Sequence
  Synthesized RNAi sequence
aaaccuagccaaauguaccaug

SEQ ID NO: 12322 - RNA, 22 nt, Artificial Sequence
  Synthesized RNAi sequence
aaaccuagugauguuaauaccu

SEQ ID NO: 12323 - RNA, 22 nt, Artificial Sequence
  Synthesized RNAi sequence
aaaccuauaagccauuugcaua

SEQ ID NO: 12324 - RNA, 22 nt, Artificial Sequence
  Synthesized RNAi sequence
aaaccucuuaguaccauugguc

SEQ ID NO: 12325 - RNA, 22 nt, Artificial Sequence
  Synthesized RNAi sequence
aaaccuucaacaccauuacaag

SEQ ID NO: 12326 - RNA, 22 nt, Artificial Sequence
  Synthesized RNAi sequence
aaacucugaacucacuuuccau

SEQ ID NO: 12327 - RNA, 22 nt, Artificial Sequence
  Synthesized RNAi sequence
aaacugaggaucugaaaacuuu

SEQ ID NO: 12328 - RNA, 22 nt, Artificial Sequence
  Synthesized RNAi sequence
aaacuguguuguugacaauucc

SEQ ID NO: 12329 - RNA, 22 nt, Artificial Sequence
  Synthesized RNAi sequence
aaacuuugaagucugccuguga

SEQ ID NO: 12330 - RNA, 22 nt, Artificial Sequence
  Synthesized RNAi sequence
aaacuuugucaggguaauaaac

SEQ ID NO: 12331 - RNA, 22 nt, Artificial Sequence
  Synthesized RNAi sequence
aaacuuuugugcacaaaugagg

SEQ ID NO: 12332 - RNA, 22 nt, Artificial Sequence
  Synthesized RNAi sequence
aaagaaagguaagaacaagucc

SEQ ID NO: 12333 - RNA, 22 nt, Artificial Sequence
  Synthesized RNAi sequence
aaagaaaguacuacuacucugu

SEQ ID NO: 12334 - RNA, 22 nt, Artificial Sequence
  Synthesized RNAi sequence
aaagaacagcaaccugguuaga

SEQ ID NO: 12335 - RNA, 22 nt, Artificial Sequence
  Synthesized RNAi sequence
aaagaacaugguguaaugucaa

SEQ ID NO: 12336 - RNA, 22 nt, Artificial Sequence
  Synthesized RNAi sequence
aaagacaccuucacgaggaaag

SEQ ID NO: 12337 - RNA, 22 nt, Artificial Sequence
  Synthesized RNAi sequence
aaagauugcugcauucaguuga

SEQ ID NO: 12338 - RNA, 22 nt, Artificial Sequence
  Synthesized RNAi sequence
aaagcaaguaaaguuugaaacc

SEQ ID NO: 12339 - RNA, 22 nt, Artificial Sequence
  Synthesized RNAi sequence
aaagcagagaucauuuaauuua

SEQ ID NO: 12340 - RNA, 22 nt, Artificial Sequence
  Synthesized RNAi sequence
aaagcauaauugucaccauuac

SEQ ID NO: 12341 - RNA, 22 nt, Artificial Sequence
  Synthesized RNAi sequence
aaagcuugugcauuuugguuga

SEQ ID NO: 12342 - RNA, 22 nt, Artificial Sequence
  Synthesized RNAi sequence
aaaggauaucauuuaaaacacu

SEQ ID NO: 12343 - RNA, 22 nt, Artificial Sequence
  Synthesized RNAi sequence
aaaggaucauaaacuguguugu

SEQ ID NO: 12344 - RNA, 22 nt, Artificial Sequence
  Synthesized RNAi sequence
aaaggcugagagacauauucaa

SEQ ID NO: 12345 - RNA, 22 nt, Artificial Sequence
  Synthesized RNAi sequence
aaagguaagaacaaguccugag

SEQ ID NO: 12346 - RNA, 22 nt, Artificial Sequence
  Synthesized RNAi sequence
aaagguccaaccagaagugauu

SEQ ID NO: 12347 - RNA, 22 nt, Artificial Sequence
  Synthesized RNAi sequence
aaagguggcaaaacaguaaggc

SEQ ID NO: 12348 - RNA, 22 nt, Artificial Sequence
  Synthesized RNAi sequence
aaagguuugagauuagacuucc

SEQ ID NO: 12349 - RNA, 22 nt, Artificial Sequence
  Synthesized RNAi sequence
aaaguacuacuacucuguaugg

SEQ ID NO: 12350 - RNA, 22 nt, Artificial Sequence
  Synthesized RNAi sequence
aaagugagucuugaauuuugcc

SEQ ID NO: 12351 - RNA, 22 nt, Artificial Sequence
  Synthesized RNAi sequence
aaagugcaauuauucgcacuag

SEQ ID NO: 12352 - RNA, 22 nt, Artificial Sequence
  Synthesized RNAi sequence
aaaguuugaaaccuagugaugu

SEQ ID NO: 12353 - RNA, 22 nt, Artificial Sequence
  Synthesized RNAi sequence
aaauaaccaucaauauucuuaa

SEQ ID NO: 12354 - RNA, 22 nt, Artificial Sequence
  Synthesized RNAi sequence
aaauaacuucuauguaaagcaa

SEQ ID NO: 12355 - RNA, 22 nt, Artificial Sequence
  Synthesized RNAi sequence
aaauauuuaucuaacuccuccu

SEQ ID NO: 12356 - RNA, 22 nt, Artificial Sequence
  Synthesized RNAi sequence
aaaucaacaucuggugauguau

SEQ ID NO: 12357 - RNA, 22 nt, Artificial Sequence
  Synthesized RNAi sequence
aaaucaucugguaauuuauaau

SEQ ID NO: 12358 - RNA, 22 nt, Artificial Sequence
  Synthesized RNAi sequence
aaauccauaaguucguuuaugu

SEQ ID NO: 12359 - RNA, 22 nt, Artificial Sequence
  Synthesized RNAi sequence
aaaucuaacaauagauucuguu

SEQ ID NO: 12360 - RNA, 22 nt, Artificial Sequence
  Synthesized RNAi sequence
aaaucuuuaauuggugguguuu

SEQ ID NO: 12361 - RNA, 22 nt, Artificial Sequence
  Synthesized RNAi sequence
aaaugaaucugcauagacauua

SEQ ID NO: 12362 - RNA, 22 nt, Artificial Sequence
  Synthesized RNAi sequence
aaaugaugcggaauuauauagg

SEQ ID NO: 12363 - RNA, 22 nt, Artificial Sequence
  Synthesized RNAi sequence
aaauggcaggagcaguugugaa

SEQ ID NO: 12364 - RNA, 22 nt, Artificial Sequence
  Synthesized RNAi sequence
aaaugguaggacaggguuauca

SEQ ID NO: 12365 - RNA, 22 nt, Artificial Sequence
  Synthesized RNAi sequence
aaaugguauuuguaaugcagca

SEQ ID NO: 12366 - RNA, 22 nt, Artificial Sequence
  Synthesized RNAi sequence
aaauguacauuguacaaucuac

SEQ ID NO: 12367 - RNA, 22 nt, Artificial Sequence
  Synthesized RNAi sequence
aaauguaccauggccauuuuau

SEQ ID NO: 12368 - RNA, 22 nt, Artificial Sequence
  Synthesized RNAi sequence
aaauguguugucuguaguaaug

SEQ ID NO: 12369 - RNA, 22 nt, Artificial Sequence
  Synthesized RNAi sequence
aaauucacagacuuuaauaaca

SEQ ID NO: 12370 - RNA, 22 nt, Artificial Sequence
  Synthesized RNAi sequence
aaauucuuggcaaccucauuga

SEQ ID NO: 12371 - RNA, 22 nt, Artificial Sequence
  Synthesized RNAi sequence
aaauugcaccaaaauuggagcu

SEQ ID NO: 12372 - RNA, 22 nt, Artificial Sequence
  Synthesized RNAi sequence
aaauuggagcuaaguuguuuaa

SEQ ID NO: 12373 - RNA, 22 nt, Artificial Sequence
  Synthesized RNAi sequence
aaauuugcagcaggauccacaa

SEQ ID NO: 12374 - RNA, 22 nt, Artificial Sequence
  Synthesized RNAi sequence
aaauuuguggguauggcaauag

SEQ ID NO: 12375 - RNA, 22 nt, Artificial Sequence
  Synthesized RNAi sequence
aacaaaagauugcugcauucag

SEQ ID NO: 12376 - RNA, 22 nt, Artificial Sequence
  Synthesized RNAi sequence
aacaaagacaccuucacgagga

SEQ ID NO: 12377 - RNA, 22 nt, Artificial Sequence
  Synthesized RNAi sequence
aacaaauccauaaguucguuua

SEQ ID NO: 12378 - RNA, 22 nt, Artificial Sequence
  Synthesized RNAi sequence
aacaacagcccuugagacaacu

SEQ ID NO: 12379 - RNA, 22 nt, Artificial Sequence
  Synthesized RNAi sequence
aacaacauuaguagcguuauua

SEQ ID NO: 12380 - RNA, 22 nt, Artificial Sequence
  Synthesized RNAi sequence
aacaagcguguuuaaagcuugu

SEQ ID NO: 12381 - RNA, 22 nt, Artificial Sequence
  Synthesized RNAi sequence
aacaaguccugaguugaaugua

SEQ ID NO: 12382 - RNA, 22 nt, Artificial Sequence
  Synthesized RNAi sequence
aacaauaaguagggacuggguc

SEQ ID NO: 12383 - RNA, 22 nt, Artificial Sequence
  Synthesized RNAi sequence
aacaauagauucuguugguugg

SEQ ID NO: 12384 - RNA, 22 nt, Artificial Sequence
  Synthesized RNAi sequence
aacaaucuauacagguaauuau

SEQ ID NO: 12385 - RNA, 22 nt, Artificial Sequence
  Synthesized RNAi sequence
aacaauuaaaaccuucaacacc

SEQ ID NO: 12386 - RNA, 22 nt, Artificial Sequence
  Synthesized RNAi sequence
aacacacugacuagagacuagu

SEQ ID NO: 12387 - RNA, 22 nt, Artificial Sequence
  Synthesized RNAi sequence
aacacaguugcugauucucuuc

SEQ ID NO: 12388 - RNA, 22 nt, Artificial Sequence
  Synthesized RNAi sequence
aacaccaucauuaaaugguagg

SEQ ID NO: 12389 - RNA, 22 nt, Artificial Sequence
  Synthesized RNAi sequence
aacaccauuacaaggugugcua

SEQ ID NO: 12390 - RNA, 22 nt, Artificial Sequence
  Synthesized RNAi sequence
aacaccauuaguggguuggaaa

SEQ ID NO: 12391 - RNA, 22 nt, Artificial Sequence
  Synthesized RNAi sequence
aacaccugugccuguuaaacca

SEQ ID NO: 12392 - RNA, 22 nt, Artificial Sequence
  Synthesized RNAi sequence
aacacgccaaguaggaguaagu

SEQ ID NO: 12393 - RNA, 22 nt, Artificial Sequence
  Synthesized RNAi sequence
aacacuaauaguaaaauuugug

SEQ ID NO: 12394 - RNA, 22 nt, Artificial Sequence
  Synthesized RNAi sequence
aacacugacaccaccaaaagaa

SEQ ID NO: 12395 - RNA, 22 nt, Artificial Sequence
  Synthesized RNAi sequence
aacacuuaaaaguggaaaauga

SEQ ID NO: 12396 - RNA, 22 nt, Artificial Sequence
  Synthesized RNAi sequence
aacacuugaaauugcaccaaaa

SEQ ID NO: 12397 - RNA, 22 nt, Artificial Sequence
  Synthesized RNAi sequence
aacagcaaccugguuagaagua

SEQ ID NO: 12398 - RNA, 22 nt, Artificial Sequence
  Synthesized RNAi sequence
aacagcccuugagacaacuaca

SEQ ID NO: 12399 - RNA, 22 nt, Artificial Sequence
  Synthesized RNAi sequence
aacagggacuucugugcaguua

SEQ ID NO: 12400 - RNA, 22 nt, Artificial Sequence
  Synthesized RNAi sequence
aacaguaaggccguuaaacuuu

SEQ ID NO: 12401 - RNA, 22 nt, Artificial Sequence
  Synthesized RNAi sequence
aacagugcagaaguguauugag

SEQ ID NO: 12402 - RNA, 22 nt, Artificial Sequence
  Synthesized RNAi sequence
aacaucacaguuaccagacaca

SEQ ID NO: 12403 - RNA, 22 nt, Artificial Sequence
  Synthesized RNAi sequence
aacauccugauaaagaacagca

SEQ ID NO: 12404 - RNA, 22 nt, Artificial Sequence
  Synthesized RNAi sequence
aacaucuggugauguaugauuc

SEQ ID NO: 12405 - RNA, 22 nt, Artificial Sequence
  Synthesized RNAi sequence
aacaugguguaaugucaagaau

SEQ ID NO: 12406 - RNA, 22 nt, Artificial Sequence
  Synthesized RNAi sequence
aacauuaguagcguuauuaaca

SEQ ID NO: 12407 - RNA, 22 nt, Artificial Sequence
  Synthesized RNAi sequence
aacauucuguguaacuccaaua

SEQ ID NO: 12408 - RNA, 22 nt, Artificial Sequence
  Synthesized RNAi sequence
aacauuggaaaagaaagguaag

SEQ ID NO: 12409 - RNA, 22 nt, Artificial Sequence
  Synthesized RNAi sequence
aaccaacaccauuaguggguug

SEQ ID NO: 12410 - RNA, 22 nt, Artificial Sequence
  Synthesized RNAi sequence
aaccaaguaacauuggaaaaga

SEQ ID NO: 12411 - RNA, 22 nt, Artificial Sequence
  Synthesized RNAi sequence
aaccagaagugauuguacccgc

SEQ ID NO: 12412 - RNA, 22 nt, Artificial Sequence
  Synthesized RNAi sequence
aaccagugugugccauuugaaa

SEQ ID NO: 12413 - RNA, 22 nt, Artificial Sequence
  Synthesized RNAi sequence
aaccauaugauuguaaaggaaa

SEQ ID NO: 12414 - RNA, 22 nt, Artificial Sequence
  Synthesized RNAi sequence
aaccaucaauauucuuaaacac

SEQ ID NO: 12415 - RNA, 22 nt, Artificial Sequence
  Synthesized RNAi sequence
aacccacauaauaagcugcagc

SEQ ID NO: 12416 - RNA, 22 nt, Artificial Sequence
  Synthesized RNAi sequence
aaccuagccaaauguaccaugg

SEQ ID NO: 12417 - RNA, 22 nt, Artificial Sequence
  Synthesized RNAi sequence
aaccuagugauguuaauaccua

SEQ ID NO: 12418 - RNA, 22 nt, Artificial Sequence
  Synthesized RNAi sequence
aaccuauaagccauuugcauag

SEQ ID NO: 12419 - RNA, 22 nt, Artificial Sequence
  Synthesized RNAi sequence
aaccuaucaauuugcacuucag

SEQ ID NO: 12420 - RNA, 22 nt, Artificial Sequence
  Synthesized RNAi sequence
aaccucuuaguaccauuggucc

SEQ ID NO: 12421 - RNA, 22 nt, Artificial Sequence
  Synthesized RNAi sequence
aaccugaagaagaaucaccagg

SEQ ID NO: 12422 - RNA, 22 nt, Artificial Sequence
  Synthesized RNAi sequence
aaccugguuagaaguauuuguu

SEQ ID NO: 12423 - RNA, 22 nt, Artificial Sequence
  Synthesized RNAi sequence
aaccuucaacaccauuacaagg

SEQ ID NO: 12424 - RNA, 22 nt, Artificial Sequence
  Synthesized RNAi sequence
aacguacacuuuguuucugaga

SEQ ID NO: 12425 - RNA, 22 nt, Artificial Sequence
  Synthesized RNAi sequence
aacuacagcaacuggucauaca

SEQ ID NO: 12426 - RNA, 22 nt, Artificial Sequence
  Synthesized RNAi sequence
aacuagcgcauauaccugcacc

SEQ ID NO: 12427 - RNA, 22 nt, Artificial Sequence
  Synthesized RNAi sequence
aacuccaauaccauuaaaccua

SEQ ID NO: 12428 - RNA, 22 nt, Artificial Sequence
  Synthesized RNAi sequence
aacuccuccuugaaugagucua

SEQ ID NO: 12429 - RNA, 22 nt, Artificial Sequence
  Synthesized RNAi sequence
aacucugaacucacuuuccauc

SEQ ID NO: 12430 - RNA, 22 nt, Artificial Sequence
  Synthesized RNAi sequence
aacugaagcauuaaugccagag

SEQ ID NO: 12431 - RNA, 22 nt, Artificial Sequence
  Synthesized RNAi sequence
aacugaauuuucugcaccaagu

SEQ ID NO: 12432 - RNA, 22 nt, Artificial Sequence
  Synthesized RNAi sequence
aacugaggaucugaaaacuuug

SEQ ID NO: 12433 - RNA, 22 nt, Artificial Sequence
  Synthesized RNAi sequence
aacuggucauacagcaaagcau

SEQ ID NO: 12434 - RNA, 22 nt, Artificial Sequence
  Synthesized RNAi sequence
aacuguguuguugacaauuccu

SEQ ID NO: 12435 - RNA, 22 nt, Artificial Sequence
  Synthesized RNAi sequence
aacuucuauguaaagcaaguaa

SEQ ID NO: 12436 - RNA, 22 nt, Artificial Sequence
  Synthesized RNAi sequence
aacuuugaagucugccugugau

SEQ ID NO: 12437 - RNA, 22 nt, Artificial Sequence
  Synthesized RNAi sequence
aacuuugucaagacgugaaagg

SEQ ID NO: 12438 - RNA, 22 nt, Artificial Sequence
  Synthesized RNAi sequence
aacuuugucaggguaauaaaca

SEQ ID NO: 12439 - RNA, 22 nt, Artificial Sequence
  Synthesized RNAi sequence
aacuuuugugcacaaaugaggu

SEQ ID NO: 12440 - RNA, 22 nt, Artificial Sequence
  Synthesized RNAi sequence
aagaaaaggcugagagacauau

SEQ ID NO: 12441 - RNA, 22 nt, Artificial Sequence
  Synthesized RNAi sequence
aagaaagguaagaacaaguccu

SEQ ID NO: 12442 - RNA, 22 nt, Artificial Sequence
  Synthesized RNAi sequence
aagaaaguacuacuacucugua

SEQ ID NO: 12443 - RNA, 22 nt, Artificial Sequence
  Synthesized RNAi sequence
aagaacaacagcccuugagaca

SEQ ID NO: 12444 - RNA, 22 nt, Artificial Sequence
  Synthesized RNAi sequence
aagaacaaguccugaguugaau

SEQ ID NO: 12445 - RNA, 22 nt, Artificial Sequence
  Synthesized RNAi sequence
aagaacaccugugccuguuaaa

SEQ ID NO: 12446 - RNA, 22 nt, Artificial Sequence
  Synthesized RNAi sequence
aagaacagcaaccugguuagaa

SEQ ID NO: 12447 - RNA, 22 nt, Artificial Sequence
  Synthesized RNAi sequence
aagaacaugguguaaugucaag

SEQ ID NO: 12448 - RNA, 22 nt, Artificial Sequence
  Synthesized RNAi sequence
aagaagaaucaccaggagucaa

SEQ ID NO: 12449 - RNA, 22 nt, Artificial Sequence
  Synthesized RNAi sequence
aagaagacuacaccaugaggug

SEQ ID NO: 12450 - RNA, 22 nt, Artificial Sequence
  Synthesized RNAi sequence
aagaaucaccaggagucaaaua

SEQ ID NO: 12451 - RNA, 22 nt, Artificial Sequence
  Synthesized RNAi sequence
aagaaucucaagugucugugga

SEQ ID NO: 12452 - RNA, 22 nt, Artificial Sequence
  Synthesized RNAi sequence
aagacaccuucacgaggaaagu

SEQ ID NO: 12453 - RNA, 22 nt, Artificial Sequence
  Synthesized RNAi sequence
aagacgugaaaggauaucauuu

SEQ ID NO: 12454 - RNA, 22 nt, Artificial Sequence
  Synthesized RNAi sequence
aagacuacaccaugaggugcug

SEQ ID NO: 12455 - RNA, 22 nt, Artificial Sequence
  Synthesized RNAi sequence
aagauaacccacauaauaagcu

SEQ ID NO: 12456 - RNA, 22 nt, Artificial Sequence
  Synthesized RNAi sequence
aagauuaacacacugacuagag

SEQ ID NO: 12457 - RNA, 22 nt, Artificial Sequence
  Synthesized RNAi sequence
aagauuagcagaagcucugauu

SEQ ID NO: 12458 - RNA, 22 nt, Artificial Sequence
  Synthesized RNAi sequence
aagauugcugcauucaguugaa

SEQ ID NO: 12459 - RNA, 22 nt, Artificial Sequence
  Synthesized RNAi sequence
aagcaaaauaaacaccaucauu

SEQ ID NO: 12460 - RNA, 22 nt, Artificial Sequence
  Synthesized RNAi sequence
aagcaacugaauuuucugcacc

SEQ ID NO: 12461 - RNA, 22 nt, Artificial Sequence
  Synthesized RNAi sequence
aagcaaguaaaguuugaaaccu

SEQ ID NO: 12462 - RNA, 22 nt, Artificial Sequence
  Synthesized RNAi sequence
aagcagagaucauuuaauuuag

SEQ ID NO: 12463 - RNA, 22 nt, Artificial Sequence
  Synthesized RNAi sequence
aagcauaauugucaccauuacu

SEQ ID NO: 12464 - RNA, 22 nt, Artificial Sequence
  Synthesized RNAi sequence
aagcauuaaugccagagauguc

SEQ ID NO: 12465 - RNA, 22 nt, Artificial Sequence
  Synthesized RNAi sequence
aagccagcaucugcaaguguca

SEQ ID NO: 12466 - RNA, 22 nt, Artificial Sequence
  Synthesized RNAi sequence
aagccagcuauaaaaccuagcc

SEQ ID NO: 12467 - RNA, 22 nt, Artificial Sequence
  Synthesized RNAi sequence
aagccauuugcauagcaaaugg

SEQ ID NO: 12468 - RNA, 22 nt, Artificial Sequence
  Synthesized RNAi sequence
aagcguguuuaaagcuugugca

SEQ ID NO: 12469 - RNA, 22 nt, Artificial Sequence
  Synthesized RNAi sequence
aagcucugauuucugcagcucu

SEQ ID NO: 12470 - RNA, 22 nt, Artificial Sequence
  Synthesized RNAi sequence
aagcuugugcauuuugguugac

SEQ ID NO: 12471 - RNA, 22 nt, Artificial Sequence
  Synthesized RNAi sequence
aaggauaucauuuaaaacacuu

SEQ ID NO: 12472 - RNA, 22 nt, Artificial Sequence
  Synthesized RNAi sequence
aaggaucauaaacuguguuguu

SEQ ID NO: 12473 - RNA, 22 nt, Artificial Sequence
  Synthesized RNAi sequence
aaggcaaucaccauauuguuug

SEQ ID NO: 12474 - RNA, 22 nt, Artificial Sequence
  Synthesized RNAi sequence
aaggccguuaaacuuuugugca

SEQ ID NO: 12475 - RNA, 22 nt, Artificial Sequence
  Synthesized RNAi sequence
aaggcugagagacauauucaaa

SEQ ID NO: 12476 - RNA, 22 nt, Artificial Sequence
  Synthesized RNAi sequence
aagguaagaacaaguccugagu

SEQ ID NO: 12477 - RNA, 22 nt, Artificial Sequence
  Synthesized RNAi sequence
aagguccaaccagaagugauug

SEQ ID NO: 12478 - RNA, 22 nt, Artificial Sequence
  Synthesized RNAi sequence
aagguccauaagaaaaggcuga

SEQ ID NO: 12479 - RNA, 22 nt, Artificial Sequence
  Synthesized RNAi sequence
aagguggcaaaacaguaaggcc

SEQ ID NO: 12480 - RNA, 22 nt, Artificial Sequence
  Synthesized RNAi sequence
aaggugugcuaccggccugaua

SEQ ID NO: 12481 - RNA, 22 nt, Artificial Sequence
  Synthesized RNAi sequence
aagguuugagauuagacuuccu

SEQ ID NO: 12482 - RNA, 22 nt, Artificial Sequence
  Synthesized RNAi sequence
aaguaaaguuugaaaccuagug

SEQ ID NO: 12483 - RNA, 22 nt, Artificial Sequence
  Synthesized RNAi sequence
aaguaacauuggaaaagaaagg

SEQ ID NO: 12484 - RNA, 22 nt, Artificial Sequence
  Synthesized RNAi sequence
aaguacuacuacucuguauggu

SEQ ID NO: 12485 - RNA, 22 nt, Artificial Sequence
  Synthesized RNAi sequence
aaguagaucuucaauaaaugac

SEQ ID NO: 12486 - RNA, 22 nt, Artificial Sequence
  Synthesized RNAi sequence
aaguaggaguaaguugaucugc

SEQ ID NO: 12487 - RNA, 22 nt, Artificial Sequence
  Synthesized RNAi sequence
aaguagggacugggucuucgaa

SEQ ID NO: 12488 - RNA, 22 nt, Artificial Sequence
  Synthesized RNAi sequence
aaguauuuguuccugguguuau

SEQ ID NO: 12489 - RNA, 22 nt, Artificial Sequence
  Synthesized RNAi sequence
aagucacaugcaagaagacuac

SEQ ID NO: 12490 - RNA, 22 nt, Artificial Sequence
  Synthesized RNAi sequence
aaguccuagguugaagauaacc

SEQ ID NO: 12491 - RNA, 22 nt, Artificial Sequence
  Synthesized RNAi sequence
aaguccugaguugaauguaaaa

SEQ ID NO: 12492 - RNA, 22 nt, Artificial Sequence
  Synthesized RNAi sequence
aagucugccugugaucaaccua

SEQ ID NO: 12493 - RNA, 22 nt, Artificial Sequence
  Synthesized RNAi sequence
aagugacauaguguaggcaaug

SEQ ID NO: 12494 - RNA, 22 nt, Artificial Sequence
  Synthesized RNAi sequence
aagugagucuugaauuuugcca

SEQ ID NO: 12495 - RNA, 22 nt, Artificial Sequence
  Synthesized RNAi sequence
aagugauuguacccgcuaacag

SEQ ID NO: 12496 - RNA, 22 nt, Artificial Sequence
  Synthesized RNAi sequence
aagugcaauuauucgcacuaga

SEQ ID NO: 12497 - RNA, 22 nt, Artificial Sequence
  Synthesized RNAi sequence
aagugcacagucuacagcaucu

SEQ ID NO: 12498 - RNA, 22 nt, Artificial Sequence
  Synthesized RNAi sequence
aaguggaaaaugaugcggaauu

SEQ ID NO: 12499 - RNA, 22 nt, Artificial Sequence
  Synthesized RNAi sequence
aaguguauugagcaaucauuuc

SEQ ID NO: 12500 - RNA, 22 nt, Artificial Sequence
  Synthesized RNAi sequence
aagugucacuuuguugaaaagu

SEQ ID NO: 12501 - RNA, 22 nt, Artificial Sequence
  Synthesized RNAi sequence
aagugucuguggaucacggaca

SEQ ID NO: 12502 - RNA, 22 nt, Artificial Sequence
  Synthesized RNAi sequence
aagugugcuuuuccaucaugac

SEQ ID NO: 12503 - RNA, 22 nt, Artificial Sequence
  Synthesized RNAi sequence
aaguucguuuauguguaaugua

SEQ ID NO: 12504 - RNA, 22 nt, Artificial Sequence
  Synthesized RNAi sequence
aaguucuuggagaucgaugaga

SEQ ID NO: 12505 - RNA, 22 nt, Artificial Sequence
  Synthesized RNAi sequence
aaguucuuuucuugugcaggga

SEQ ID NO: 12506 - RNA, 22 nt, Artificial Sequence
  Synthesized RNAi sequence
aaguugaucugcaugaauagca

SEQ ID NO: 12507 - RNA, 22 nt, Artificial Sequence
  Synthesized RNAi sequence
aaguuguuuaacaagcguguuu

SEQ ID NO: 12508 - RNA, 22 nt, Artificial Sequence
  Synthesized RNAi sequence
aaguuugaaaccuagugauguu

SEQ ID NO: 12509 - RNA, 22 nt, Artificial Sequence
  Synthesized RNAi sequence
aaguuuguaauauuaggaaauc

SEQ ID NO: 12510 - RNA, 22 nt, Artificial Sequence
  Synthesized RNAi sequence
aaguuuuccaagugcacuugcu

SEQ ID NO: 12511 - RNA, 22 nt, Artificial Sequence
  Synthesized RNAi sequence
aauaaacaccacgugugaaaga

SEQ ID NO: 12512 - RNA, 22 nt, Artificial Sequence
  Synthesized RNAi sequence
aauaaacaccaucauuaaaugg

SEQ ID NO: 12513 - RNA, 22 nt, Artificial Sequence
  Synthesized RNAi sequence
aauaaacacgccaaguaggagu

SEQ ID NO: 12514 - RNA, 22 nt, Artificial Sequence
  Synthesized RNAi sequence
aauaaacucugaacucacuuuc

SEQ ID NO: 12515 - RNA, 22 nt, Artificial Sequence
  Synthesized RNAi sequence
aauaaaugaccucuugcuuggu

SEQ ID NO: 12516 - RNA, 22 nt, Artificial Sequence
  Synthesized RNAi sequence
aauaaccaucaauauucuuaaa

SEQ ID NO: 12517 - RNA, 22 nt, Artificial Sequence
  Synthesized RNAi sequence
aauaacuucuauguaaagcaag

SEQ ID NO: 12518 - RNA, 22 nt, Artificial Sequence
  Synthesized RNAi sequence
aauaagcugcagcaccagcugu

SEQ ID NO: 12519 - RNA, 22 nt, Artificial Sequence
  Synthesized RNAi sequence
aauaaguagggacugggucuuc

SEQ ID NO: 12520 - RNA, 22 nt, Artificial Sequence
  Synthesized RNAi sequence
aauaaucagcaacacaguugcu

SEQ ID NO: 12521 - RNA, 22 nt, Artificial Sequence
  Synthesized RNAi sequence
aauaccauuaaaccuauaagcc

SEQ ID NO: 12522 - RNA, 22 nt, Artificial Sequence
  Synthesized RNAi sequence
aauaccuauuggcaaaucuacc

SEQ ID NO: 12523 - RNA, 22 nt, Artificial Sequence
  Synthesized RNAi sequence
aauagaaaaguccuagguugaa

SEQ ID NO: 12524 - RNA, 22 nt, Artificial Sequence
  Synthesized RNAi sequence
aauagaguuauuagaguaagca

SEQ ID NO: 12525 - RNA, 22 nt, Artificial Sequence
  Synthesized RNAi sequence
aauagauucuguugguuggacu

SEQ ID NO: 12526 - RNA, 22 nt, Artificial Sequence
  Synthesized RNAi sequence
aauagcaacagggacuucugug

SEQ ID NO: 12527 - RNA, 22 nt, Artificial Sequence
  Synthesized RNAi sequence
aauaggcgugugcuuagaauau

SEQ ID NO: 12528 - RNA, 22 nt, Artificial Sequence
  Synthesized RNAi sequence
aauaguaaaauuuguggguaug

SEQ ID NO: 12529 - RNA, 22 nt, Artificial Sequence
  Synthesized RNAi sequence
aauaucaccaaggcaaucacca

SEQ ID NO: 12530 - RNA, 22 nt, Artificial Sequence
  Synthesized RNAi sequence
aaucaacaucuggugauguaug

SEQ ID NO: 12531 - RNA, 22 nt, Artificial Sequence
  Synthesized RNAi sequence
aaucaagccagcuauaaaaccu

SEQ ID NO: 12532 - RNA, 22 nt, Artificial Sequence
  Synthesized RNAi sequence
aaucaccacaaauguacauugu

SEQ ID NO: 12533 - RNA, 22 nt, Artificial Sequence
  Synthesized RNAi sequence
aaucaccaggagucaaauaacu

SEQ ID NO: 12534 - RNA, 22 nt, Artificial Sequence
  Synthesized RNAi sequence
aaucaccauauuguuugaugaa

SEQ ID NO: 12535 - RNA, 22 nt, Artificial Sequence
  Synthesized RNAi sequence
aaucagcaacacaguugcugau

SEQ ID NO: 12536 - RNA, 22 nt, Artificial Sequence
  Synthesized RNAi sequence
aaucagcaaucuuuccaguuug

SEQ ID NO: 12537 - RNA, 22 nt, Artificial Sequence
  Synthesized RNAi sequence
aaucaucugguaauuuauaauu

SEQ ID NO: 12538 - RNA, 22 nt, Artificial Sequence
  Synthesized RNAi sequence
aauccauaaguucguuuaugug

SEQ ID NO: 12539 - RNA, 22 nt, Artificial Sequence
  Synthesized RNAi sequence
aaucuaacaauagauucuguug

SEQ ID NO: 12540 - RNA, 22 nt, Artificial Sequence
  Synthesized RNAi sequence
aaucuacugaugucuuggucau

SEQ ID NO: 12541 - RNA, 22 nt, Artificial Sequence
  Synthesized RNAi sequence
aaucuauacagguaauuauaau

SEQ ID NO: 12542 - RNA, 22 nt, Artificial Sequence
  Synthesized RNAi sequence
aaucucaagugucuguggauca

SEQ ID NO: 12543 - RNA, 22 nt, Artificial Sequence
  Synthesized RNAi sequence
aaucugcauagacauuaguaaa

SEQ ID NO: 12544 - RNA, 22 nt, Artificial Sequence
  Synthesized RNAi sequence
aaugaaucugcauagacauuag

SEQ ID NO: 12545 - RNA, 22 nt, Artificial Sequence
  Synthesized RNAi sequence
aaugaggucucuagcagcaaua

SEQ ID NO: 12546 - RNA, 22 nt, Artificial Sequence
  Synthesized RNAi sequence
aaugagucuaauucagguugca

SEQ ID NO: 12547 - RNA, 22 nt, Artificial Sequence
  Synthesized RNAi sequence
aaugaugcggaauuauauagga

SEQ ID NO: 12548 - RNA, 22 nt, Artificial Sequence
  Synthesized RNAi sequence
aaugauggauugacuagcuaca

SEQ ID NO: 12549 - RNA, 22 nt, Artificial Sequence
  Synthesized RNAi sequence
aaugcagcaccugcaccaaagg

SEQ ID NO: 12550 - RNA, 22 nt, Artificial Sequence
  Synthesized RNAi sequence
aaugccagagaugucaccuaaa

SEQ ID NO: 12551 - RNA, 22 nt, Artificial Sequence
  Synthesized RNAi sequence
aauggcaggagcaguugugaag

SEQ ID NO: 12552 - RNA, 22 nt, Artificial Sequence
  Synthesized RNAi sequence
aauggguaugucacacucauau

SEQ ID NO: 12553 - RNA, 22 nt, Artificial Sequence
  Synthesized RNAi sequence
aaugguaggacaggguuaucaa

SEQ ID NO: 12554 - RNA, 22 nt, Artificial Sequence
  Synthesized RNAi sequence
aaugguauuuguaaugcagcac

SEQ ID NO: 12555 - RNA, 22 nt, Artificial Sequence
  Synthesized RNAi sequence
aaugguuccauuuucauuauau

SEQ ID NO: 12556 - RNA, 22 nt, Artificial Sequence
  Synthesized RNAi sequence
aauguaaaacugaggaucugaa

SEQ ID NO: 12557 - RNA, 22 nt, Artificial Sequence
  Synthesized RNAi sequence
aauguaauuugacuccuuugag

SEQ ID NO: 12558 - RNA, 22 nt, Artificial Sequence
  Synthesized RNAi sequence
aauguacauuguacaaucuacu

SEQ ID NO: 12559 - RNA, 22 nt, Artificial Sequence
  Synthesized RNAi sequence
aauguaccauggccauuuuaua

SEQ ID NO: 12560 - RNA, 22 nt, Artificial Sequence
  Synthesized RNAi sequence
aaugucaagaaucucaaguguc

SEQ ID NO: 12561 - RNA, 22 nt, Artificial Sequence
  Synthesized RNAi sequence
aaugucucugccaaauuguugg

SEQ ID NO: 12562 - RNA, 22 nt, Artificial Sequence
  Synthesized RNAi sequence
aauguguugucuguaguaauga

SEQ ID NO: 12563 - RNA, 22 nt, Artificial Sequence
  Synthesized RNAi sequence
aauuaaaaccuucaacaccauu

SEQ ID NO: 12564 - RNA, 22 nt, Artificial Sequence
  Synthesized RNAi sequence
aauuaauaggcgugugcuuaga

SEQ ID NO: 12565 - RNA, 22 nt, Artificial Sequence
  Synthesized RNAi sequence
aauuaauuguugagucacauau

SEQ ID NO: 12566 - RNA, 22 nt, Artificial Sequence
  Synthesized RNAi sequence
aauuacaaaugaaucugcauag

SEQ ID NO: 12567 - RNA, 22 nt, Artificial Sequence
  Synthesized RNAi sequence
aauuagucugagucugauaacu

SEQ ID NO: 12568 - RNA, 22 nt, Artificial Sequence
  Synthesized RNAi sequence
aauuauaaucagcaaucuuucc

SEQ ID NO: 12569 - RNA, 22 nt, Artificial Sequence
  Synthesized RNAi sequence
aauuauaauuaccaccaaccuu

SEQ ID NO: 12570 - RNA, 22 nt, Artificial Sequence
  Synthesized RNAi sequence
aauuauucgcacuagaauaaac

SEQ ID NO: 12571 - RNA, 22 nt, Artificial Sequence
  Synthesized RNAi sequence
aauucacagacuuuaauaacaa

SEQ ID NO: 12572 - RNA, 22 nt, Artificial Sequence
  Synthesized RNAi sequence
aauucagguugcaaaggaucau

SEQ ID NO: 12573 - RNA, 22 nt, Artificial Sequence
  Synthesized RNAi sequence
aauuccuauuacaacaucacag

SEQ ID NO: 12574 - RNA, 22 nt, Artificial Sequence
  Synthesized RNAi sequence
aauucuuggcaaccucauugag

SEQ ID NO: 12575 - RNA, 22 nt, Artificial Sequence
  Synthesized RNAi sequence
aauugcaccaaaauuggagcua

SEQ ID NO: 12576 - RNA, 22 nt, Artificial Sequence
  Synthesized RNAi sequence
aauuggagcuaaguuguuuaac

SEQ ID NO: 12577 - RNA, 22 nt, Artificial Sequence
  Synthesized RNAi sequence
aauugucaccauuacuauggca

SEQ ID NO: 12578 - RNA, 22 nt, Artificial Sequence
  Synthesized RNAi sequence
aauuguugagucacauaugucu

SEQ ID NO: 12579 - RNA, 22 nt, Artificial Sequence
  Synthesized RNAi sequence
aauuuaguaggagacacuccau

SEQ ID NO: 12580 - RNA, 22 nt, Artificial Sequence
  Synthesized RNAi sequence
aauuucugugguaacacuaaua

SEQ ID NO: 12581 - RNA, 22 nt, Artificial Sequence
  Synthesized RNAi sequence
aauuugacuccuuugagcacug

SEQ ID NO: 12582 - RNA, 22 nt, Artificial Sequence
  Synthesized RNAi sequence
aauuugcacuucagccucaacu

SEQ ID NO: 12583 - RNA, 22 nt, Artificial Sequence
  Synthesized RNAi sequence
aauuugcagcaggauccacaag

SEQ ID NO: 12584 - RNA, 22 nt, Artificial Sequence
  Synthesized RNAi sequence
aauuuguggguauggcaauaga

SEQ ID NO: 12585 - RNA, 22 nt, Artificial Sequence
  Synthesized RNAi sequence
aauuuucugcaccaagugacau

SEQ ID NO: 12586 - RNA, 22 nt, Artificial Sequence
  Synthesized RNAi sequence
aauuuugccaauagcacuauua

SEQ ID NO: 12587 - RNA, 22 nt, Artificial Sequence
  Synthesized RNAi sequence
acaaaagauugcugcauucagu

SEQ ID NO: 12588 - RNA, 22 nt, Artificial Sequence
  Synthesized RNAi sequence
acaaagacaccuucacgaggaa

SEQ ID NO: 12589 - RNA, 22 nt, Artificial Sequence
  Synthesized RNAi sequence
acaaauccauaaguucguuuau

SEQ ID NO: 12590 - RNA, 22 nt, Artificial Sequence
  Synthesized RNAi sequence
acaaaugaaucugcauagacau

SEQ ID NO: 12591 - RNA, 22 nt, Artificial Sequence
  Synthesized RNAi sequence
acaaaugaggucucuagcagca

SEQ ID NO: 12592 - RNA, 22 nt, Artificial Sequence
  Synthesized RNAi sequence
acaaauggcaggagcaguugug

SEQ ID NO: 12593 - RNA, 22 nt, Artificial Sequence
  Synthesized RNAi sequence
acaaauguacauuguacaaucu

SEQ ID NO: 12594 - RNA, 22 nt, Artificial Sequence
  Synthesized RNAi sequence
acaacagcccuugagacaacua

SEQ ID NO: 12595 - RNA, 22 nt, Artificial Sequence
  Synthesized RNAi sequence
acaacaucacaguuaccagaca

SEQ ID NO: 12596 - RNA, 22 nt, Artificial Sequence
  Synthesized RNAi sequence
acaacauuaguagcguuauuaa

SEQ ID NO: 12597 - RNA, 22 nt, Artificial Sequence
  Synthesized RNAi sequence
acaacuacagcaacuggucaua

SEQ ID NO: 12598 - RNA, 22 nt, Artificial Sequence
  Synthesized RNAi sequence
acaagaacaacagcccuugaga

SEQ ID NO: 12599 - RNA, 22 nt, Artificial Sequence
  Synthesized RNAi sequence
acaagcguguuuaaagcuugug

SEQ ID NO: 12600 - RNA, 22 nt, Artificial Sequence
  Synthesized RNAi sequence
acaaguccugaguugaauguaa

SEQ ID NO: 12601 - RNA, 22 nt, Artificial Sequence
  Synthesized RNAi sequence
acaaguuuguaauauuaggaaa

SEQ ID NO: 12602 - RNA, 22 nt, Artificial Sequence
  Synthesized RNAi sequence
acaauaaguagggacugggucu

SEQ ID NO: 12603 - RNA, 22 nt, Artificial Sequence
  Synthesized RNAi sequence
acaauagauucuguugguugga

SEQ ID NO: 12604 - RNA, 22 nt, Artificial Sequence
  Synthesized RNAi sequence
acaaucuacugaugucuugguc

SEQ ID NO: 12605 - RNA, 22 nt, Artificial Sequence
  Synthesized RNAi sequence
acaaucuauacagguaauuaua

SEQ ID NO: 12606 - RNA, 22 nt, Artificial Sequence
  Synthesized RNAi sequence
acaauuaaaaccuucaacacca

SEQ ID NO: 12607 - RNA, 22 nt, Artificial Sequence
  Synthesized RNAi sequence
acaauuccuauuacaacaucac

SEQ ID NO: 12608 - RNA, 22 nt, Artificial Sequence
  Synthesized RNAi sequence
acacaaauguguugucuguagu

SEQ ID NO: 12609 - RNA, 22 nt, Artificial Sequence
  Synthesized RNAi sequence
acacacugacuagagacuagug

SEQ ID NO: 12610 - RNA, 22 nt, Artificial Sequence
  Synthesized RNAi sequence
acacaguugcugauucucuucc

SEQ ID NO: 12611 - RNA, 22 nt, Artificial Sequence
  Synthesized RNAi sequence
acaccaccaaaagaacauggug

SEQ ID NO: 12612 - RNA, 22 nt, Artificial Sequence
  Synthesized RNAi sequence
acaccaucauuaaaugguagga

SEQ ID NO: 12613 - RNA, 22 nt, Artificial Sequence
  Synthesized RNAi sequence
acaccaugaggugcugacugag

SEQ ID NO: 12614 - RNA, 22 nt, Artificial Sequence
  Synthesized RNAi sequence
acaccauuacaaggugugcuac

SEQ ID NO: 12615 - RNA, 22 nt, Artificial Sequence
  Synthesized RNAi sequence
acaccauuaguggguuggaaac

SEQ ID NO: 12616 - RNA, 22 nt, Artificial Sequence
  Synthesized RNAi sequence
acaccugugccuguuaaaccau

SEQ ID NO: 12617 - RNA, 22 nt, Artificial Sequence
  Synthesized RNAi sequence
acaccuucacgaggaaagugug

SEQ ID NO: 12618 - RNA, 22 nt, Artificial Sequence
  Synthesized RNAi sequence
acacgccaaguaggaguaaguu

SEQ ID NO: 12619 - RNA, 22 nt, Artificial Sequence
  Synthesized RNAi sequence
acacuaauaguaaaauuugugg

SEQ ID NO: 12620 - RNA, 22 nt, Artificial Sequence
  Synthesized RNAi sequence
acacucauaugaguuguugaca

SEQ ID NO: 12621 - RNA, 22 nt, Artificial Sequence
  Synthesized RNAi sequence
acacuccauaacacuuaaaagu

SEQ ID NO: 12622 - RNA, 22 nt, Artificial Sequence
  Synthesized RNAi sequence
acacucugacauuuuaguagca

SEQ ID NO: 12623 - RNA, 22 nt, Artificial Sequence
  Synthesized RNAi sequence
acacugacaccaccaaaagaac

SEQ ID NO: 12624 - RNA, 22 nt, Artificial Sequence
  Synthesized RNAi sequence
acacugacuagagacuaguggc

SEQ ID NO: 12625 - RNA, 22 nt, Artificial Sequence
  Synthesized RNAi sequence
acacugguagaauuucuguggu

SEQ ID NO: 12626 - RNA, 22 nt, Artificial Sequence
  Synthesized RNAi sequence
acacuuaaaaguggaaaaugau

SEQ ID NO: 12627 - RNA, 22 nt, Artificial Sequence
  Synthesized RNAi sequence
acacuugaaauugcaccaaaau

SEQ ID NO: 12628 - RNA, 22 nt, Artificial Sequence
  Synthesized RNAi sequence
acacuuuguuucugagagaggg

SEQ ID NO: 12629 - RNA, 22 nt, Artificial Sequence
  Synthesized RNAi sequence
acagaauaaucagcaacacagu

SEQ ID NO: 12630 - RNA, 22 nt, Artificial Sequence
  Synthesized RNAi sequence
acagacuuuaauaacaacauua

SEQ ID NO: 12631 - RNA, 22 nt, Artificial Sequence
  Synthesized RNAi sequence
acagcaaagcauaauugucacc

SEQ ID NO: 12632 - RNA, 22 nt, Artificial Sequence
  Synthesized RNAi sequence
acagcaaccugguuagaaguau

SEQ ID NO: 12633 - RNA, 22 nt, Artificial Sequence
  Synthesized RNAi sequence
acagcaacuggucauacagcaa

SEQ ID NO: 12634 - RNA, 22 nt, Artificial Sequence
  Synthesized RNAi sequence
acagcaucaguagugucagcaa

SEQ ID NO: 12635 - RNA, 22 nt, Artificial Sequence
  Synthesized RNAi sequence
acagcaucuguaaugguuccau

SEQ ID NO: 12636 - RNA, 22 nt, Artificial Sequence
  Synthesized RNAi sequence
acagcccuugagacaacuacag

SEQ ID NO: 12637 - RNA, 22 nt, Artificial Sequence
  Synthesized RNAi sequence
acagcuauuccaguuaaagcac

SEQ ID NO: 12638 - RNA, 22 nt, Artificial Sequence
  Synthesized RNAi sequence
acagggacuucugugcaguuaa

SEQ ID NO: 12639 - RNA, 22 nt, Artificial Sequence
  Synthesized RNAi sequence
acaggguuaucaaaccucuuag

SEQ ID NO: 12640 - RNA, 22 nt, Artificial Sequence
  Synthesized RNAi sequence
acagguaauuauaauuaccacc

SEQ ID NO: 12641 - RNA, 22 nt, Artificial Sequence
  Synthesized RNAi sequence
acagucuacagcaucuguaaug

SEQ ID NO: 12642 - RNA, 22 nt, Artificial Sequence
  Synthesized RNAi sequence
acagugcagaaguguauugagc

SEQ ID NO: 12643 - RNA, 22 nt, Artificial Sequence
  Synthesized RNAi sequence
acaguuaccagacacaaaugug

SEQ ID NO: 12644 - RNA, 22 nt, Artificial Sequence
  Synthesized RNAi sequence
acaguugcugauucucuuccug

SEQ ID NO: 12645 - RNA, 22 nt, Artificial Sequence
  Synthesized RNAi sequence
acaguugcuggugcauguagaa

SEQ ID NO: 12646 - RNA, 22 nt, Artificial Sequence
  Synthesized RNAi sequence
acauaagucacaugcaagaaga

SEQ ID NO: 12647 - RNA, 22 nt, Artificial Sequence
  Synthesized RNAi sequence
acauaauaagcugcagcaccag

SEQ ID NO: 12648 - RNA, 22 nt, Artificial Sequence
  Synthesized RNAi sequence
acauaugucugcaaacuuugaa

SEQ ID NO: 12649 - RNA, 22 nt, Artificial Sequence
  Synthesized RNAi sequence
acauauucaaaagugcaauuau

SEQ ID NO: 12650 - RNA, 22 nt, Artificial Sequence
  Synthesized RNAi sequence
acaucacaguuaccagacacaa

SEQ ID NO: 12651 - RNA, 22 nt, Artificial Sequence
  Synthesized RNAi sequence
acauccugauaaagaacagcaa

SEQ ID NO: 12652 - RNA, 22 nt, Artificial Sequence
  Synthesized RNAi sequence
acaucuggugauguaugauucu

SEQ ID NO: 12653 - RNA, 22 nt, Artificial Sequence
  Synthesized RNAi sequence
acaucuugaaguuuuccaagug

SEQ ID NO: 12654 - RNA, 22 nt, Artificial Sequence
  Synthesized RNAi sequence
acaugcaagaagacuacaccau

SEQ ID NO: 12655 - RNA, 22 nt, Artificial Sequence
  Synthesized RNAi sequence
acauguauagcauggaaccaag

SEQ ID NO: 12656 - RNA, 22 nt, Artificial Sequence
  Synthesized RNAi sequence
acauguucagccccuauuaaac

SEQ ID NO: 12657 - RNA, 22 nt, Artificial Sequence
  Synthesized RNAi sequence
acauuaguaaagcagagaucau

SEQ ID NO: 12658 - RNA, 22 nt, Artificial Sequence
  Synthesized RNAi sequence
acauuaguagcguuauuaacaa

SEQ ID NO: 12659 - RNA, 22 nt, Artificial Sequence
  Synthesized RNAi sequence
acauucuguguaacuccaauac

SEQ ID NO: 12660 - RNA, 22 nt, Artificial Sequence
  Synthesized RNAi sequence
acauuggaaaagaaagguaaga

SEQ ID NO: 12661 - RNA, 22 nt, Artificial Sequence
  Synthesized RNAi sequence
acauuguacaaucuacugaugu

SEQ ID NO: 12662 - RNA, 22 nt, Artificial Sequence
  Synthesized RNAi sequence
acauuuuaguagcagcaagauu

SEQ ID NO: 12663 - RNA, 22 nt, Artificial Sequence
  Synthesized RNAi sequence
accaaaagaacaugguguaaug

SEQ ID NO: 12664 - RNA, 22 nt, Artificial Sequence
  Synthesized RNAi sequence
accaaaauuggagcuaaguugu

SEQ ID NO: 12665 - RNA, 22 nt, Artificial Sequence
  Synthesized RNAi sequence
accaaagguccaaccagaagug

SEQ ID NO: 12666 - RNA, 22 nt, Artificial Sequence
  Synthesized RNAi sequence
accaacaccauuaguggguugg

SEQ ID NO: 12667 - RNA, 22 nt, Artificial Sequence
  Synthesized RNAi sequence
accaaggcaaucaccauauugu

SEQ ID NO: 12668 - RNA, 22 nt, Artificial Sequence
  Synthesized RNAi sequence
accaaguaacauuggaaaagaa

SEQ ID NO: 12669 - RNA, 22 nt, Artificial Sequence
  Synthesized RNAi sequence
accaagugacauaguguaggca

SEQ ID NO: 12670 - RNA, 22 nt, Artificial Sequence
  Synthesized RNAi sequence
accaauggguaugucacacuca

SEQ ID NO: 12671 - RNA, 22 nt, Artificial Sequence
  Synthesized RNAi sequence
accacaaauguacauuguacaa

SEQ ID NO: 12672 - RNA, 22 nt, Artificial Sequence
  Synthesized RNAi sequence
accacaucuugaaguuuuccaa

SEQ ID NO: 12673 - RNA, 22 nt, Artificial Sequence
  Synthesized RNAi sequence
accaccaaaagaacauggugua

SEQ ID NO: 12674 - RNA, 22 nt, Artificial Sequence
  Synthesized RNAi sequence
accagaagugauuguacccgcu

SEQ ID NO: 12675 - RNA, 22 nt, Artificial Sequence
  Synthesized RNAi sequence
accagacacaaauguguugucu

SEQ ID NO: 12676 - RNA, 22 nt, Artificial Sequence
  Synthesized RNAi sequence
accagcuguccaaccugaagaa

SEQ ID NO: 12677 - RNA, 22 nt, Artificial Sequence
  Synthesized RNAi sequence
accaggagucaaauaacuucua

SEQ ID NO: 12678 - RNA, 22 nt, Artificial Sequence
  Synthesized RNAi sequence
accagugugugccauuugaaac

SEQ ID NO: 12679 - RNA, 22 nt, Artificial Sequence
  Synthesized RNAi sequence
accauaugauuguaaaggaaag

SEQ ID NO: 12680 - RNA, 22 nt, Artificial Sequence
  Synthesized RNAi sequence
accauauuguuugaugaagcca

SEQ ID NO: 12681 - RNA, 22 nt, Artificial Sequence
  Synthesized RNAi sequence
accaucaauauucuuaaacaca

SEQ ID NO: 12682 - RNA, 22 nt, Artificial Sequence
  Synthesized RNAi sequence
accaucauuaaaugguaggaca

SEQ ID NO: 12683 - RNA, 22 nt, Artificial Sequence
  Synthesized RNAi sequence
accaugaggugcugacugaggg

SEQ ID NO: 12684 - RNA, 22 nt, Artificial Sequence
  Synthesized RNAi sequence
accauggccauuuuauauacug

SEQ ID NO: 12685 - RNA, 22 nt, Artificial Sequence
  Synthesized RNAi sequence
accauuaaaccuauaagccauu

SEQ ID NO: 12686 - RNA, 22 nt, Artificial Sequence
  Synthesized RNAi sequence
accauuacaaggugugcuaccg

SEQ ID NO: 12687 - RNA, 22 nt, Artificial Sequence
  Synthesized RNAi sequence
accauuacuauggcaaucaagc

SEQ ID NO: 12688 - RNA, 22 nt, Artificial Sequence
  Synthesized RNAi sequence
accauuaguggguuggaaacca

SEQ ID NO: 12689 - RNA, 22 nt, Artificial Sequence
  Synthesized RNAi sequence
accauuggucccagagacaugu

SEQ ID NO: 12690 - RNA, 22 nt, Artificial Sequence
  Synthesized RNAi sequence
acccacauaauaagcugcagca

SEQ ID NO: 12691 - RNA, 22 nt, Artificial Sequence
  Synthesized RNAi sequence
acccgcuaacagugcagaagug

SEQ ID NO: 12692 - RNA, 22 nt, Artificial Sequence
  Synthesized RNAi sequence
accggccugauagauuucaguu

SEQ ID NO: 12693 - RNA, 22 nt, Artificial Sequence
  Synthesized RNAi sequence
accuagccaaauguaccauggc

SEQ ID NO: 12694 - RNA, 22 nt, Artificial Sequence
  Synthesized RNAi sequence
accuagugauguuaauaccuau

SEQ ID NO: 12695 - RNA, 22 nt, Artificial Sequence
  Synthesized RNAi sequence
accuauaagccauuugcauagc

SEQ ID NO: 12696 - RNA, 22 nt, Artificial Sequence
  Synthesized RNAi sequence
accucuaauuacaaaugaaucu

SEQ ID NO: 12697 - RNA, 22 nt, Artificial Sequence
  Synthesized RNAi sequence
accucuuaguaccauugguccc

SEQ ID NO: 12698 - RNA, 22 nt, Artificial Sequence
  Synthesized RNAi sequence
accucuugcuugguuuugaugg

SEQ ID NO: 12699 - RNA, 22 nt, Artificial Sequence
  Synthesized RNAi sequence
accugcaccaaagguccaacca

SEQ ID NO: 12700 - RNA, 22 nt, Artificial Sequence
  Synthesized RNAi sequence
accugcaccaauggguauguca

SEQ ID NO: 12701 - RNA, 22 nt, Artificial Sequence
  Synthesized RNAi sequence
accugguuagaaguauuuguuc

SEQ ID NO: 12702 - RNA, 22 nt, Artificial Sequence
  Synthesized RNAi sequence
accugugccuguuaaaccauug

SEQ ID NO: 12703 - RNA, 22 nt, Artificial Sequence
  Synthesized RNAi sequence
accuucaacaccauuacaaggu

SEQ ID NO: 12704 - RNA, 22 nt, Artificial Sequence
  Synthesized RNAi sequence
accuucacgaggaaagugugcu

SEQ ID NO: 12705 - RNA, 22 nt, Artificial Sequence
  Synthesized RNAi sequence
acgaggaaagugugcuuuucca

SEQ ID NO: 12706 - RNA, 22 nt, Artificial Sequence
  Synthesized RNAi sequence
acgcacuaaauuaauaggcgug

SEQ ID NO: 12707 - RNA, 22 nt, Artificial Sequence
  Synthesized RNAi sequence
acgccaaguaggaguaaguuga

SEQ ID NO: 12708 - RNA, 22 nt, Artificial Sequence
  Synthesized RNAi sequence
acggacagcaucaguaguguca

SEQ ID NO: 12709 - RNA, 22 nt, Artificial Sequence
  Synthesized RNAi sequence
acguacacuuuguuucugagag

SEQ ID NO: 12710 - RNA, 22 nt, Artificial Sequence
  Synthesized RNAi sequence
acgugaaaggauaucauuuaaa

SEQ ID NO: 12711 - RNA, 22 nt, Artificial Sequence
  Synthesized RNAi sequence
acgugcccgccgaggagaauua

SEQ ID NO: 12712 - RNA, 22 nt, Artificial Sequence
  Synthesized RNAi sequence
acuaaauuaauaggcgugugcu

SEQ ID NO: 12713 - RNA, 22 nt, Artificial Sequence
  Synthesized RNAi sequence
acuaauaguaaaauuugugggu

SEQ ID NO: 12714 - RNA, 22 nt, Artificial Sequence
  Synthesized RNAi sequence
acuacaccaugaggugcugacu

SEQ ID NO: 12715 - RNA, 22 nt, Artificial Sequence
  Synthesized RNAi sequence
acuacuacucuguaugguuggu

SEQ ID NO: 12716 - RNA, 22 nt, Artificial Sequence
  Synthesized RNAi sequence
acuacucuguaugguugguaac

SEQ ID NO: 12717 - RNA, 22 nt, Artificial Sequence
  Synthesized RNAi sequence
acuagcgcauauaccugcacca

SEQ ID NO: 12718 - RNA, 22 nt, Artificial Sequence
  Synthesized RNAi sequence
acuagcuacacuacgugcccgc

SEQ ID NO: 12719 - RNA, 22 nt, Artificial Sequence
  Synthesized RNAi sequence
acuauggcaaucaagccagcua

SEQ ID NO: 12720 - RNA, 22 nt, Artificial Sequence
  Synthesized RNAi sequence
acucauaugaguuguugacaug

SEQ ID NO: 12721 - RNA, 22 nt, Artificial Sequence
  Synthesized RNAi sequence
acuccaauaccauuaaaccuau

SEQ ID NO: 12722 - RNA, 22 nt, Artificial Sequence
  Synthesized RNAi sequence
acuccauaacacuuaaaagugg

SEQ ID NO: 12723 - RNA, 22 nt, Artificial Sequence
  Synthesized RNAi sequence
acuccuccuugaaugagucuaa

SEQ ID NO: 12724 - RNA, 22 nt, Artificial Sequence
  Synthesized RNAi sequence
acuccuuugagcacuggcucag

SEQ ID NO: 12725 - RNA, 22 nt, Artificial Sequence
  Synthesized RNAi sequence
acucugaacucacuuuccaucc

SEQ ID NO: 12726 - RNA, 22 nt, Artificial Sequence
  Synthesized RNAi sequence
acucugacauuuuaguagcagc

SEQ ID NO: 12727 - RNA, 22 nt, Artificial Sequence
  Synthesized RNAi sequence
acucuguaugguugguaaccaa

SEQ ID NO: 12728 - RNA, 22 nt, Artificial Sequence
  Synthesized RNAi sequence
acugaagcauuaaugccagaga

SEQ ID NO: 12729 - RNA, 22 nt, Artificial Sequence
  Synthesized RNAi sequence
acugaauuuucugcaccaagug

SEQ ID NO: 12730 - RNA, 22 nt, Artificial Sequence
  Synthesized RNAi sequence
acugacaccaccaaaagaacau

SEQ ID NO: 12731 - RNA, 22 nt, Artificial Sequence
  Synthesized RNAi sequence
acugaggaucugaaaacuuugu

SEQ ID NO: 12732 - RNA, 22 nt, Artificial Sequence
  Synthesized RNAi sequence
acugagggaaggacauaagaug

SEQ ID NO: 12733 - RNA, 22 nt, Artificial Sequence
  Synthesized RNAi sequence
acugaugucuuggucauagaca

SEQ ID NO: 12734 - RNA, 22 nt, Artificial Sequence
  Synthesized RNAi sequence
acugcucauacuuuccaaguuc

SEQ ID NO: 12735 - RNA, 22 nt, Artificial Sequence
  Synthesized RNAi sequence
acuggcucagagucgucuucau

SEQ ID NO: 12736 - RNA, 22 nt, Artificial Sequence
  Synthesized RNAi sequence
acuggucauacagcaaagcaua

SEQ ID NO: 12737 - RNA, 22 nt, Artificial Sequence
  Synthesized RNAi sequence
acuguguuguugacaauuccua

SEQ ID NO: 12738 - RNA, 22 nt, Artificial Sequence
  Synthesized RNAi sequence
acuucaucaccucuaauuacaa

SEQ ID NO: 12739 - RNA, 22 nt, Artificial Sequence
  Synthesized RNAi sequence
acuuccuaaacaaucuauacag

SEQ ID NO: 12740 - RNA, 22 nt, Artificial Sequence
  Synthesized RNAi sequence
acuucuauguaaagcaaguaaa

SEQ ID NO: 12741 - RNA, 22 nt, Artificial Sequence
  Synthesized RNAi sequence
acuucucaguggaagcaaaaua

SEQ ID NO: 12742 - RNA, 22 nt, Artificial Sequence
  Synthesized RNAi sequence
acuucugugcaguuaacauccu

SEQ ID NO: 12743 - RNA, 22 nt, Artificial Sequence
  Synthesized RNAi sequence
acuugaaauugcaccaaaauug

SEQ ID NO: 12744 - RNA, 22 nt, Artificial Sequence
  Synthesized RNAi sequence
acuugcuguggaagaaagugag

SEQ ID NO: 12745 - RNA, 22 nt, Artificial Sequence
  Synthesized RNAi sequence
acuuuaauaacaacauuaguag

SEQ ID NO: 12746 - RNA, 22 nt, Artificial Sequence
  Synthesized RNAi sequence
acuuuccaaguucuuggagauc

SEQ ID NO: 12747 - RNA, 22 nt, Artificial Sequence
  Synthesized RNAi sequence
acuuugaagucugccugugauc

SEQ ID NO: 12748 - RNA, 22 nt, Artificial Sequence
  Synthesized RNAi sequence
acuuugucaagacgugaaagga

SEQ ID NO: 12749 - RNA, 22 nt, Artificial Sequence
  Synthesized RNAi sequence
acuuugucaggguaauaaacac

SEQ ID NO: 12750 - RNA, 22 nt, Artificial Sequence
  Synthesized RNAi sequence
acuuuguugaaaaguagaucuu

SEQ ID NO: 12751 - RNA, 22 nt, Artificial Sequence
  Synthesized RNAi sequence
acuuuguuucugagagaggguc

SEQ ID NO: 12752 - RNA, 22 nt, Artificial Sequence
  Synthesized RNAi sequence
acuuuugugcacaaaugagguc

SEQ ID NO: 12753 - RNA, 22 nt, Artificial Sequence
  Synthesized RNAi sequence
agaaaaggcugagagacauauu

SEQ ID NO: 12754 - RNA, 22 nt, Artificial Sequence
  Synthesized RNAi sequence
agaaaaguccuagguugaagau

SEQ ID NO: 12755 - RNA, 22 nt, Artificial Sequence
  Synthesized RNAi sequence
agaaaguacuacuacucuguau

SEQ ID NO: 12756 - RNA, 22 nt, Artificial Sequence
  Synthesized RNAi sequence
agaacaccugugccuguuaaac

SEQ ID NO: 12757 - RNA, 22 nt, Artificial Sequence
  Synthesized RNAi sequence
agaacagcaaccugguuagaag

SEQ ID NO: 12758 - RNA, 22 nt, Artificial Sequence
  Synthesized RNAi sequence
agaacaugguguaaugucaaga

SEQ ID NO: 12759 - RNA, 22 nt, Artificial Sequence
  Synthesized RNAi sequence
agaacauucuguguaacuccaa

SEQ ID NO: 12760 - RNA, 22 nt, Artificial Sequence
  Synthesized RNAi sequence
agaagaaucaccaggagucaaa

SEQ ID NO: 12761 - RNA, 22 nt, Artificial Sequence
  Synthesized RNAi sequence
agaagacuacaccaugaggugc

SEQ ID NO: 12762 - RNA, 22 nt, Artificial Sequence
  Synthesized RNAi sequence
agaagcucugauuucugcagcu

SEQ ID NO: 12763 - RNA, 22 nt, Artificial Sequence
  Synthesized RNAi sequence
agaaguauuuguuccugguguu

SEQ ID NO: 12764 - RNA, 22 nt, Artificial Sequence
  Synthesized RNAi sequence
agaagugauuguacccgcuaac

SEQ ID NO: 12765 - RNA, 22 nt, Artificial Sequence
  Synthesized RNAi sequence
agaaguguauugagcaaucauu

SEQ ID NO: 12766 - RNA, 22 nt, Artificial Sequence
  Synthesized RNAi sequence
agaauaaacacgccaaguagga

SEQ ID NO: 12767 - RNA, 22 nt, Artificial Sequence
  Synthesized RNAi sequence
agaauaaacucugaacucacuu

SEQ ID NO: 12768 - RNA, 22 nt, Artificial Sequence
  Synthesized RNAi sequence
agaauaaucagcaacacaguug

SEQ ID NO: 12769 - RNA, 22 nt, Artificial Sequence
  Synthesized RNAi sequence
agaaucaccaggagucaaauaa

SEQ ID NO: 12770 - RNA, 22 nt, Artificial Sequence
  Synthesized RNAi sequence
agaaucucaagugucuguggau

SEQ ID NO: 12771 - RNA, 22 nt, Artificial Sequence
  Synthesized RNAi sequence
agaauuagucugagucugauaa

SEQ ID NO: 12772 - RNA, 22 nt, Artificial Sequence
  Synthesized RNAi sequence
agaauuucugugguaacacuaa

SEQ ID NO: 12773 - RNA, 22 nt, Artificial Sequence
  Synthesized RNAi sequence
agacaacuacagcaacugguca

SEQ ID NO: 12774 - RNA, 22 nt, Artificial Sequence
  Synthesized RNAi sequence
agacacaaauguguugucugua

SEQ ID NO: 12775 - RNA, 22 nt, Artificial Sequence
  Synthesized RNAi sequence
agacaccuucacgaggaaagug

SEQ ID NO: 12776 - RNA, 22 nt, Artificial Sequence
  Synthesized RNAi sequence
agacacuccauaacacuuaaaa

SEQ ID NO: 12777 - RNA, 22 nt, Artificial Sequence
  Synthesized RNAi sequence
agacacugguagaauuucugug

SEQ ID NO: 12778 - RNA, 22 nt, Artificial Sequence
  Synthesized RNAi sequence
agacauguauagcauggaacca

SEQ ID NO: 12779 - RNA, 22 nt, Artificial Sequence
  Synthesized RNAi sequence
agacauuaguaaagcagagauc

SEQ ID NO: 12780 - RNA, 22 nt, Artificial Sequence
  Synthesized RNAi sequence
agacgugaaaggauaucauuua

SEQ ID NO: 12781 - RNA, 22 nt, Artificial Sequence
  Synthesized RNAi sequence
agacuacaccaugaggugcuga

SEQ ID NO: 12782 - RNA, 22 nt, Artificial Sequence
  Synthesized RNAi sequence
agacuuccuaaacaaucuauac

SEQ ID NO: 12783 - RNA, 22 nt, Artificial Sequence
  Synthesized RNAi sequence
agacuucucaguggaagcaaaa

SEQ ID NO: 12784 - RNA, 22 nt, Artificial Sequence
  Synthesized RNAi sequence
agacuuuaauaacaacauuagu

SEQ ID NO: 12785 - RNA, 22 nt, Artificial Sequence
  Synthesized RNAi sequence
agagacauauucaaaagugcaa

SEQ ID NO: 12786 - RNA, 22 nt, Artificial Sequence
  Synthesized RNAi sequence
agagacauguauagcauggaac

SEQ ID NO: 12787 - RNA, 22 nt, Artificial Sequence
  Synthesized RNAi sequence
agagagggucaagugcacaguc

SEQ ID NO: 12788 - RNA, 22 nt, Artificial Sequence
  Synthesized RNAi sequence
agagaugucaccuaaaucaaca

SEQ ID NO: 12789 - RNA, 22 nt, Artificial Sequence
  Synthesized RNAi sequence
agagauucauuuaaauucuugg

SEQ ID NO: 12790 - RNA, 22 nt, Artificial Sequence
  Synthesized RNAi sequence
agagggucaagugcacagucua

SEQ ID NO: 12791 - RNA, 22 nt, Artificial Sequence
  Synthesized RNAi sequence
agaguaagcaacugaauuuucu

SEQ ID NO: 12792 - RNA, 22 nt, Artificial Sequence
  Synthesized RNAi sequence
agagucgucuucaucaaauuug

SEQ ID NO: 12793 - RNA, 22 nt, Artificial Sequence
  Synthesized RNAi sequence
agaguuauuagaguaagcaacu

SEQ ID NO: 12794 - RNA, 22 nt, Artificial Sequence
  Synthesized RNAi sequence
agauaacccacauaauaagcug

SEQ ID NO: 12795 - RNA, 22 nt, Artificial Sequence
  Synthesized RNAi sequence
agaucauuuaauuuaguaggag

SEQ ID NO: 12796 - RNA, 22 nt, Artificial Sequence
  Synthesized RNAi sequence
agaucgaugagagauucauuua

SEQ ID NO: 12797 - RNA, 22 nt, Artificial Sequence
  Synthesized RNAi sequence
agaucuucaauaaaugaccucu

SEQ ID NO: 12798 - RNA, 22 nt, Artificial Sequence
  Synthesized RNAi sequence
agaugucaccuaaaucaacauc

SEQ ID NO: 12799 - RNA, 22 nt, Artificial Sequence
  Synthesized RNAi sequence
agauuaacacacugacuagaga

SEQ ID NO: 12800 - RNA, 22 nt, Artificial Sequence
  Synthesized RNAi sequence
agauuagacuuccuaaacaauc

SEQ ID NO: 12801 - RNA, 22 nt, Artificial Sequence
  Synthesized RNAi sequence
agauuagcagaagcucugauuu

SEQ ID NO: 12802 - RNA, 22 nt, Artificial Sequence
  Synthesized RNAi sequence
agauucauuuaaauucuuggca

SEQ ID NO: 12803 - RNA, 22 nt, Artificial Sequence
  Synthesized RNAi sequence
agauucuguugguuggacucua

SEQ ID NO: 12804 - RNA, 22 nt, Artificial Sequence
  Synthesized RNAi sequence
agauugcugcauucaguugaau

SEQ ID NO: 12805 - RNA, 22 nt, Artificial Sequence
  Synthesized RNAi sequence
agauuucaguugaaauaucucu

SEQ ID NO: 12806 - RNA, 22 nt, Artificial Sequence
  Synthesized RNAi sequence
agcaaaauaaacaccaucauua

SEQ ID NO: 12807 - RNA, 22 nt, Artificial Sequence
  Synthesized RNAi sequence
agcaaagcauaauugucaccau

SEQ ID NO: 12808 - RNA, 22 nt, Artificial Sequence
  Synthesized RNAi sequence
agcaaagguggcaaaacaguaa

SEQ ID NO: 12809 - RNA, 22 nt, Artificial Sequence
  Synthesized RNAi sequence
agcaaaugguauuuguaaugca

SEQ ID NO: 12810 - RNA, 22 nt, Artificial Sequence
  Synthesized RNAi sequence
agcaacagggacuucugugcag

SEQ ID NO: 12811 - RNA, 22 nt, Artificial Sequence
  Synthesized RNAi sequence
agcaaccugguuagaaguauuu

SEQ ID NO: 12812 - RNA, 22 nt, Artificial Sequence
  Synthesized RNAi sequence
agcaacugaauuuucugcacca

SEQ ID NO: 12813 - RNA, 22 nt, Artificial Sequence
  Synthesized RNAi sequence
agcaacuggucauacagcaaag

SEQ ID NO: 12814 - RNA, 22 nt, Artificial Sequence
  Synthesized RNAi sequence
agcaagauuagcagaagcucug

SEQ ID NO: 12815 - RNA, 22 nt, Artificial Sequence
  Synthesized RNAi sequence
agcaaguaaaguuugaaaccua

SEQ ID NO: 12816 - RNA, 22 nt, Artificial Sequence
  Synthesized RNAi sequence
agcaauaucaccaaggcaauca

SEQ ID NO: 12817 - RNA, 22 nt, Artificial Sequence
  Synthesized RNAi sequence
agcaaucauuucaucugugagc

SEQ ID NO: 12818 - RNA, 22 nt, Artificial Sequence
  Synthesized RNAi sequence
agcaaucuuuccaguuugcccu

SEQ ID NO: 12819 - RNA, 22 nt, Artificial Sequence
  Synthesized RNAi sequence
agcaaugucucugccaaauugu

SEQ ID NO: 12820 - RNA, 22 nt, Artificial Sequence
  Synthesized RNAi sequence
agcaccagcuguccaaccugaa

SEQ ID NO: 12821 - RNA, 22 nt, Artificial Sequence
  Synthesized RNAi sequence
agcaccugcaccaaagguccaa

SEQ ID NO: 12822 - RNA, 22 nt, Artificial Sequence
  Synthesized RNAi sequence
agcacuggcucagagucgucuu

SEQ ID NO: 12823 - RNA, 22 nt, Artificial Sequence
  Synthesized RNAi sequence
agcagaagcucugauuucugca

SEQ ID NO: 12824 - RNA, 22 nt, Artificial Sequence
  Synthesized RNAi sequence
agcagagaucauuuaauuuagu

SEQ ID NO: 12825 - RNA, 22 nt, Artificial Sequence
  Synthesized RNAi sequence
agcagcaagauuagcagaagcu

SEQ ID NO: 12826 - RNA, 22 nt, Artificial Sequence
  Synthesized RNAi sequence
agcagcaauaucaccaaggcaa

SEQ ID NO: 12827 - RNA, 22 nt, Artificial Sequence
  Synthesized RNAi sequence
agcaggauccacaagaacaaca

SEQ ID NO: 12828 - RNA, 22 nt, Artificial Sequence
  Synthesized RNAi sequence
agcaguugugaaguucuuuucu

SEQ ID NO: 12829 - RNA, 22 nt, Artificial Sequence
  Synthesized RNAi sequence
agcauaauugucaccauuacua

SEQ ID NO: 12830 - RNA, 22 nt, Artificial Sequence
  Synthesized RNAi sequence
agcaucaguagugucagcaaug

SEQ ID NO: 12831 - RNA, 22 nt, Artificial Sequence
  Synthesized RNAi sequence
agcaucugcaagugucacuuug

SEQ ID NO: 12832 - RNA, 22 nt, Artificial Sequence
  Synthesized RNAi sequence
agcaucuguaaugguuccauuu

SEQ ID NO: 12833 - RNA, 22 nt, Artificial Sequence
  Synthesized RNAi sequence
agcauggaaccaaguaacauug

SEQ ID NO: 12834 - RNA, 22 nt, Artificial Sequence
  Synthesized RNAi sequence
agcauuaaugccagagauguca

SEQ ID NO: 12835 - RNA, 22 nt, Artificial Sequence
  Synthesized RNAi sequence
agccaaauguaccauggccauu

SEQ ID NO: 12836 - RNA, 22 nt, Artificial Sequence
  Synthesized RNAi sequence
agccagcaucugcaagugucac

SEQ ID NO: 12837 - RNA, 22 nt, Artificial Sequence
  Synthesized RNAi sequence
agccagcuauaaaaccuagcca

SEQ ID NO: 12838 - RNA, 22 nt, Artificial Sequence
  Synthesized RNAi sequence
agccauuugcauagcaaauggu

SEQ ID NO: 12839 - RNA, 22 nt, Artificial Sequence
  Synthesized RNAi sequence
agcccuugagacaacuacagca

SEQ ID NO: 12840 - RNA, 22 nt, Artificial Sequence
  Synthesized RNAi sequence
agccucaacuuugucaagacgu

SEQ ID NO: 12841 - RNA, 22 nt, Artificial Sequence
  Synthesized RNAi sequence
agccuguaaaaucaucugguaa

SEQ ID NO: 12842 - RNA, 22 nt, Artificial Sequence
  Synthesized RNAi sequence
agcgauuugucugacuucauca

SEQ ID NO: 12843 - RNA, 22 nt, Artificial Sequence
  Synthesized RNAi sequence
agcgcauauaccugcaccaaug

SEQ ID NO: 12844 - RNA, 22 nt, Artificial Sequence
  Synthesized RNAi sequence
agcguguuuaaagcuugugcau

SEQ ID NO: 12845 - RNA, 22 nt, Artificial Sequence
  Synthesized RNAi sequence
agcguuauuaacaauaaguagg

SEQ ID NO: 12846 - RNA, 22 nt, Artificial Sequence
  Synthesized RNAi sequence
agcuaaguuguuuaacaagcgu

SEQ ID NO: 12847 - RNA, 22 nt, Artificial Sequence
  Synthesized RNAi sequence
agcuauaaaaccuagccaaaug

SEQ ID NO: 12848 - RNA, 22 nt, Artificial Sequence
  Synthesized RNAi sequence
agcuauuccaguuaaagcacgg

SEQ ID NO: 12849 - RNA, 22 nt, Artificial Sequence
  Synthesized RNAi sequence
agcucuaauuaauuguugaguc

SEQ ID NO: 12850 - RNA, 22 nt, Artificial Sequence
  Synthesized RNAi sequence
agcucugauuucugcagcucua

SEQ ID NO: 12851 - RNA, 22 nt, Artificial Sequence
  Synthesized RNAi sequence
agcugcagcaccagcuguccaa

SEQ ID NO: 12852 - RNA, 22 nt, Artificial Sequence
  Synthesized RNAi sequence
agcuugugcauuuugguugacc

SEQ ID NO: 12853 - RNA, 22 nt, Artificial Sequence
  Synthesized RNAi sequence
aggaaaguaacaauuaaaaccu

SEQ ID NO: 12854 - RNA, 22 nt, Artificial Sequence
  Synthesized RNAi sequence
aggaaagugugcuuuuccauca

SEQ ID NO: 12855 - RNA, 22 nt, Artificial Sequence
  Synthesized RNAi sequence
aggaaaucuaacaauagauucu

SEQ ID NO: 12856 - RNA, 22 nt, Artificial Sequence
  Synthesized RNAi sequence
aggacagaauaaucagcaacac

SEQ ID NO: 12857 - RNA, 22 nt, Artificial Sequence
  Synthesized RNAi sequence
aggacaggguuaucaaaccucu

SEQ ID NO: 12858 - RNA, 22 nt, Artificial Sequence
  Synthesized RNAi sequence
aggagaauuagucugagucuga

SEQ ID NO: 12859 - RNA, 22 nt, Artificial Sequence
  Synthesized RNAi sequence
aggagacacuccauaacacuua

SEQ ID NO: 12860 - RNA, 22 nt, Artificial Sequence
  Synthesized RNAi sequence
aggagcaguugugaaguucuuu

SEQ ID NO: 12861 - RNA, 22 nt, Artificial Sequence
  Synthesized RNAi sequence
aggaguaaguugaucugcauga

SEQ ID NO: 12862 - RNA, 22 nt, Artificial Sequence
  Synthesized RNAi sequence
aggagucaaauaacuucuaugu

SEQ ID NO: 12863 - RNA, 22 nt, Artificial Sequence
  Synthesized RNAi sequence
aggauccacaagaacaacagcc

SEQ ID NO: 12864 - RNA, 22 nt, Artificial Sequence
  Synthesized RNAi sequence
aggaucugaaaacuuugucagg

SEQ ID NO: 12865 - RNA, 22 nt, Artificial Sequence
  Synthesized RNAi sequence
aggcaaucaccauauuguuuga

SEQ ID NO: 12866 - RNA, 22 nt, Artificial Sequence
  Synthesized RNAi sequence
aggcaaugauggauugacuagc

SEQ ID NO: 12867 - RNA, 22 nt, Artificial Sequence
  Synthesized RNAi sequence
aggccguuaaacuuuugugcac

SEQ ID NO: 12868 - RNA, 22 nt, Artificial Sequence
  Synthesized RNAi sequence
aggcgugugcuuagaauauauu

SEQ ID NO: 12869 - RNA, 22 nt, Artificial Sequence
  Synthesized RNAi sequence
agggacauaagucacaugcaag

SEQ ID NO: 12870 - RNA, 22 nt, Artificial Sequence
  Synthesized RNAi sequence
agggacuucugugcaguuaaca

SEQ ID NO: 12871 - RNA, 22 nt, Artificial Sequence
  Synthesized RNAi sequence
agggcacaaguuuguaauauua

SEQ ID NO: 12872 - RNA, 22 nt, Artificial Sequence
  Synthesized RNAi sequence
aggguaauaaacaccacgugug

SEQ ID NO: 12873 - RNA, 22 nt, Artificial Sequence
  Synthesized RNAi sequence
agggucaagugcacagucuaca

SEQ ID NO: 12874 - RNA, 22 nt, Artificial Sequence
  Synthesized RNAi sequence
aggguuaucaaaccucuuagua

SEQ ID NO: 12875 - RNA, 22 nt, Artificial Sequence
  Synthesized RNAi sequence
agguaagaacaaguccugaguu

SEQ ID NO: 12876 - RNA, 22 nt, Artificial Sequence
  Synthesized RNAi sequence
agguaauuauaauuaccaccaa

SEQ ID NO: 12877 - RNA, 22 nt, Artificial Sequence
  Synthesized RNAi sequence
agguccaaccagaagugauugu

SEQ ID NO: 12878 - RNA, 22 nt, Artificial Sequence
  Synthesized RNAi sequence
aggucucuagcagcaauaucac

SEQ ID NO: 12879 - RNA, 22 nt, Artificial Sequence
  Synthesized RNAi sequence
aggugcugacugagggaaggac

SEQ ID NO: 12880 - RNA, 22 nt, Artificial Sequence
  Synthesized RNAi sequence
agguggcaaaacaguaaggccg

SEQ ID NO: 12881 - RNA, 22 nt, Artificial Sequence
  Synthesized RNAi sequence
aggugugcuaccggccugauag

SEQ ID NO: 12882 - RNA, 22 nt, Artificial Sequence
  Synthesized RNAi sequence
agguugaagauaacccacauaa

SEQ ID NO: 12883 - RNA, 22 nt, Artificial Sequence
  Synthesized RNAi sequence
agguugcaaaggaucauaaacu

SEQ ID NO: 12884 - RNA, 22 nt, Artificial Sequence
  Synthesized RNAi sequence
agguuugagauuagacuuccua

SEQ ID NO: 12885 - RNA, 22 nt, Artificial Sequence
  Synthesized RNAi sequence
aguaaaauuuguggguauggca

SEQ ID NO: 12886 - RNA, 22 nt, Artificial Sequence
  Synthesized RNAi sequence
aguaaagcagagaucauuuaau

SEQ ID NO: 12887 - RNA, 22 nt, Artificial Sequence
  Synthesized RNAi sequence
aguaaaguuugaaaccuaguga

SEQ ID NO: 12888 - RNA, 22 nt, Artificial Sequence
  Synthesized RNAi sequence
aguaacaauuaaaaccuucaac

SEQ ID NO: 12889 - RNA, 22 nt, Artificial Sequence
  Synthesized RNAi sequence
aguaagcaacugaauuuucugc

SEQ ID NO: 12890 - RNA, 22 nt, Artificial Sequence
  Synthesized RNAi sequence
aguaaggccguuaaacuuuugu

SEQ ID NO: 12891 - RNA, 22 nt, Artificial Sequence
  Synthesized RNAi sequence
aguaaguugaucugcaugaaua

SEQ ID NO: 12892 - RNA, 22 nt, Artificial Sequence
  Synthesized RNAi sequence
aguaccauuggucccagagaca

SEQ ID NO: 12893 - RNA, 22 nt, Artificial Sequence
  Synthesized RNAi sequence
aguacuacuacucuguaugguu

SEQ ID NO: 12894 - RNA, 22 nt, Artificial Sequence
  Synthesized RNAi sequence
aguagaucuucaauaaaugacc

SEQ ID NO: 12895 - RNA, 22 nt, Artificial Sequence
  Synthesized RNAi sequence
aguagcguuauuaacaauaagu

SEQ ID NO: 12896 - RNA, 22 nt, Artificial Sequence
  Synthesized RNAi sequence
aguaggaguaaguugaucugca

SEQ ID NO: 12897 - RNA, 22 nt, Artificial Sequence
  Synthesized RNAi sequence
aguagggacugggucuucgaau

SEQ ID NO: 12898 - RNA, 22 nt, Artificial Sequence
  Synthesized RNAi sequence
aguagugucagcaaugucucug

SEQ ID NO: 12899 - RNA, 22 nt, Artificial Sequence
  Synthesized RNAi sequence
aguauuuguuccugguguuaua

SEQ ID NO: 12900 - RNA, 22 nt, Artificial Sequence
  Synthesized RNAi sequence
agucaaauaacuucuauguaaa

SEQ ID NO: 12901 - RNA, 22 nt, Artificial Sequence
  Synthesized RNAi sequence
agucacauaugucugcaaacuu

SEQ ID NO: 12902 - RNA, 22 nt, Artificial Sequence
  Synthesized RNAi sequence
agucacaugcaagaagacuaca

SEQ ID NO: 12903 - RNA, 22 nt, Artificial Sequence
  Synthesized RNAi sequence
aguccuagguugaagauaaccc

SEQ ID NO: 12904 - RNA, 22 nt, Artificial Sequence
  Synthesized RNAi sequence
agucgucuucaucaaauuugca

SEQ ID NO: 12905 - RNA, 22 nt, Artificial Sequence
  Synthesized RNAi sequence
agucuaauucagguugcaaagg

SEQ ID NO: 12906 - RNA, 22 nt, Artificial Sequence
  Synthesized RNAi sequence
agucuacagcaucuguaauggu

SEQ ID NO: 12907 - RNA, 22 nt, Artificial Sequence
  Synthesized RNAi sequence
agucugagucugauaacuagcg

SEQ ID NO: 12908 - RNA, 22 nt, Artificial Sequence
  Synthesized RNAi sequence
agucugauaacuagcgcauaua

SEQ ID NO: 12909 - RNA, 22 nt, Artificial Sequence
  Synthesized RNAi sequence
agucugccugugaucaaccuau

SEQ ID NO: 12910 - RNA, 22 nt, Artificial Sequence
  Synthesized RNAi sequence
agucuugaauuuugccaauagc

SEQ ID NO: 12911 - RNA, 22 nt, Artificial Sequence
  Synthesized RNAi sequence
agugacauaguguaggcaauga

SEQ ID NO: 12912 - RNA, 22 nt, Artificial Sequence
  Synthesized RNAi sequence
agugagucuugaauuuugccaa

SEQ ID NO: 12913 - RNA, 22 nt, Artificial Sequence
  Synthesized RNAi sequence
agugauguuaauaccuauuggc

SEQ ID NO: 12914 - RNA, 22 nt, Artificial Sequence
  Synthesized RNAi sequence
agugauuguacccgcuaacagu

SEQ ID NO: 12915 - RNA, 22 nt, Artificial Sequence
  Synthesized RNAi sequence
agugcaauuauucgcacuagaa

SEQ ID NO: 12916 - RNA, 22 nt, Artificial Sequence
  Synthesized RNAi sequence
agugcacagucuacagcaucug

SEQ ID NO: 12917 - RNA, 22 nt, Artificial Sequence
  Synthesized RNAi sequence
agugcacuugcuguggaagaaa

SEQ ID NO: 12918 - RNA, 22 nt, Artificial Sequence
  Synthesized RNAi sequence
agugcagaaguguauugagcaa

SEQ ID NO: 12919 - RNA, 22 nt, Artificial Sequence
  Synthesized RNAi sequence
aguggaaaaugaugcggaauua

SEQ ID NO: 12920 - RNA, 22 nt, Artificial Sequence
  Synthesized RNAi sequence
aguggguuggaaaccauaugau

SEQ ID NO: 12921 - RNA, 22 nt, Artificial Sequence
  Synthesized RNAi sequence
aguguaggcaaugauggauuga

SEQ ID NO: 12922 - RNA, 22 nt, Artificial Sequence
  Synthesized RNAi sequence
aguguauugagcaaucauuuca

SEQ ID NO: 12923 - RNA, 22 nt, Artificial Sequence
  Synthesized RNAi sequence
agugucacuuuguugaaaagua

SEQ ID NO: 12924 - RNA, 22 nt, Artificial Sequence
  Synthesized RNAi sequence
agugucagcaaugucucugcca

SEQ ID NO: 12925 - RNA, 22 nt, Artificial Sequence
  Synthesized RNAi sequence
agugucuguggaucacggacag

SEQ ID NO: 12926 - RNA, 22 nt, Artificial Sequence
  Synthesized RNAi sequence
agugugcuuuuccaucaugaca

SEQ ID NO: 12927 - RNA, 22 nt, Artificial Sequence
  Synthesized RNAi sequence
agugugugccauuugaaacaaa

SEQ ID NO: 12928 - RNA, 22 nt, Artificial Sequence
  Synthesized RNAi sequence
aguuaacauccugauaaagaac

SEQ ID NO: 12929 - RNA, 22 nt, Artificial Sequence
  Synthesized RNAi sequence
aguuaccagacacaaauguguu

SEQ ID NO: 12930 - RNA, 22 nt, Artificial Sequence
  Synthesized RNAi sequence
aguucaaaagaaaguacuacua

SEQ ID NO: 12931 - RNA, 22 nt, Artificial Sequence
  Synthesized RNAi sequence
aguucguuuauguguaauguaa

SEQ ID NO: 12932 - RNA, 22 nt, Artificial Sequence
  Synthesized RNAi sequence
aguucuuggagaucgaugagag

SEQ ID NO: 12933 - RNA, 22 nt, Artificial Sequence
  Synthesized RNAi sequence
aguucuuuucuugugcagggac

SEQ ID NO: 12934 - RNA, 22 nt, Artificial Sequence
  Synthesized RNAi sequence
aguugaaauaucucucucaaaa

SEQ ID NO: 12935 - RNA, 22 nt, Artificial Sequence
  Synthesized RNAi sequence
aguugaaucaccacaaauguac

SEQ ID NO: 12936 - RNA, 22 nt, Artificial Sequence
  Synthesized RNAi sequence
aguugaauguaaaacugaggau

SEQ ID NO: 12937 - RNA, 22 nt, Artificial Sequence
  Synthesized RNAi sequence
aguugcugauucucuuccuguu

SEQ ID NO: 12938 - RNA, 22 nt, Artificial Sequence
  Synthesized RNAi sequence
aguugcuggugcauguagaagu

SEQ ID NO: 12939 - RNA, 22 nt, Artificial Sequence
  Synthesized RNAi sequence
aguuguugacauguucagcccc

SEQ ID NO: 12940 - RNA, 22 nt, Artificial Sequence
  Synthesized RNAi sequence
aguuguuuaacaagcguguuua

SEQ ID NO: 12941 - RNA, 22 nt, Artificial Sequence
  Synthesized RNAi sequence
aguuugaaaccuagugauguua

SEQ ID NO: 12942 - RNA, 22 nt, Artificial Sequence
  Synthesized RNAi sequence
aguuugcccuggagcgauuugu

SEQ ID NO: 12943 - RNA, 22 nt, Artificial Sequence
  Synthesized RNAi sequence
aguuuguaauauuaggaaaucu

SEQ ID NO: 12944 - RNA, 22 nt, Artificial Sequence
  Synthesized RNAi sequence
aguuuuccaagugcacuugcug

SEQ ID NO: 12945 - RNA, 22 nt, Artificial Sequence
  Synthesized RNAi sequence
auaaacaaauccauaaguucgu

SEQ ID NO: 12946 - RNA, 22 nt, Artificial Sequence
  Synthesized RNAi sequence
auaaacaccacgugugaaagaa

SEQ ID NO: 12947 - RNA, 22 nt, Artificial Sequence
  Synthesized RNAi sequence
auaaacaccaucauuaaauggu

SEQ ID NO: 12948 - RNA, 22 nt, Artificial Sequence
  Synthesized RNAi sequence
auaaacacgccaaguaggagua

SEQ ID NO: 12949 - RNA, 22 nt, Artificial Sequence
  Synthesized RNAi sequence
auaaacucugaacucacuuucc

SEQ ID NO: 12950 - RNA, 22 nt, Artificial Sequence
  Synthesized RNAi sequence
auaaacuguguuguugacaauu

SEQ ID NO: 12951 - RNA, 22 nt, Artificial Sequence
  Synthesized RNAi sequence
auaaagaacagcaaccugguua

SEQ ID NO: 12952 - RNA, 22 nt, Artificial Sequence
  Synthesized RNAi sequence
auaaaugaccucuugcuugguu

SEQ ID NO: 12953 - RNA, 22 nt, Artificial Sequence
  Synthesized RNAi sequence
auaacaacauuaguagcguuau

SEQ ID NO: 12954 - RNA, 22 nt, Artificial Sequence
  Synthesized RNAi sequence
auaacacuuaaaaguggaaaau

SEQ ID NO: 12955 - RNA, 22 nt, Artificial Sequence
  Synthesized RNAi sequence
auaaccaucaauauucuuaaac

SEQ ID NO: 12956 - RNA, 22 nt, Artificial Sequence
  Synthesized RNAi sequence
auaacccacauaauaagcugca

SEQ ID NO: 12957 - RNA, 22 nt, Artificial Sequence
  Synthesized RNAi sequence
auaacuagcgcauauaccugca

SEQ ID NO: 12958 - RNA, 22 nt, Artificial Sequence
  Synthesized RNAi sequence
auaacuucuauguaaagcaagu

SEQ ID NO: 12959 - RNA, 22 nt, Artificial Sequence
  Synthesized RNAi sequence
auaagaaaaggcugagagacau

SEQ ID NO: 12960 - RNA, 22 nt, Artificial Sequence
  Synthesized RNAi sequence
auaagccauuugcauagcaaau

SEQ ID NO: 12961 - RNA, 22 nt, Artificial Sequence
  Synthesized RNAi sequence
auaaguagggacugggucuucg

SEQ ID NO: 12962 - RNA, 22 nt, Artificial Sequence
  Synthesized RNAi sequence
auaagucacaugcaagaagacu

SEQ ID NO: 12963 - RNA, 22 nt, Artificial Sequence
  Synthesized RNAi sequence
auaaguucguuuauguguaaug

SEQ ID NO: 12964 - RNA, 22 nt, Artificial Sequence
  Synthesized RNAi sequence
auaauaagcugcagcaccagcu

SEQ ID NO: 12965 - RNA, 22 nt, Artificial Sequence
  Synthesized RNAi sequence
auaaucagcaacacaguugcug

SEQ ID NO: 12966 - RNA, 22 nt, Artificial Sequence
  Synthesized RNAi sequence
auaaucagcaaucuuuccaguu

SEQ ID NO: 12967 - RNA, 22 nt, Artificial Sequence
  Synthesized RNAi sequence
auaauuaccaccaaccuuagaa

SEQ ID NO: 12968 - RNA, 22 nt, Artificial Sequence
  Synthesized RNAi sequence
auaauuauaaucagcaaucuuu

SEQ ID NO: 12969 - RNA, 22 nt, Artificial Sequence
  Synthesized RNAi sequence
auaauugucaccauuacuaugg

SEQ ID NO: 12970 - RNA, 22 nt, Artificial Sequence
  Synthesized RNAi sequence
auacagcaaagcauaauuguca

SEQ ID NO: 12971 - RNA, 22 nt, Artificial Sequence
  Synthesized RNAi sequence
auacagguaauuauaauuacca

SEQ ID NO: 12972 - RNA, 22 nt, Artificial Sequence
  Synthesized RNAi sequence
auaccauuaaaccuauaagcca

SEQ ID NO: 12973 - RNA, 22 nt, Artificial Sequence
  Synthesized RNAi sequence
auaccuauuggcaaaucuacca

SEQ ID NO: 12974 - RNA, 22 nt, Artificial Sequence
  Synthesized RNAi sequence
auaccugcaccaauggguaugu

SEQ ID NO: 12975 - RNA, 22 nt, Artificial Sequence
  Synthesized RNAi sequence
auacugcucauacuuuccaagu

SEQ ID NO: 12976 - RNA, 22 nt, Artificial Sequence
  Synthesized RNAi sequence
auacuuuccaaguucuuggaga

SEQ ID NO: 12977 - RNA, 22 nt, Artificial Sequence
  Synthesized RNAi sequence
auagaaaaguccuagguugaag

SEQ ID NO: 12978 - RNA, 22 nt, Artificial Sequence
  Synthesized RNAi sequence
auagacacugguagaauuucug

SEQ ID NO: 12979 - RNA, 22 nt, Artificial Sequence
  Synthesized RNAi sequence
auagacauuaguaaagcagaga

SEQ ID NO: 12980 - RNA, 22 nt, Artificial Sequence
  Synthesized RNAi sequence
auagaguuauuagaguaagcaa

SEQ ID NO: 12981 - RNA, 22 nt, Artificial Sequence
  Synthesized RNAi sequence
auagauucuguugguuggacuc

SEQ ID NO: 12982 - RNA, 22 nt, Artificial Sequence
  Synthesized RNAi sequence
auagauuucaguugaaauaucu

SEQ ID NO: 12983 - RNA, 22 nt, Artificial Sequence
  Synthesized RNAi sequence
auagcaaaugguauuuguaaug

SEQ ID NO: 12984 - RNA, 22 nt, Artificial Sequence
  Synthesized RNAi sequence
auagcaacagggacuucugugc

SEQ ID NO: 12985 - RNA, 22 nt, Artificial Sequence
  Synthesized RNAi sequence
auagcauggaaccaaguaacau

SEQ ID NO: 12986 - RNA, 22 nt, Artificial Sequence
  Synthesized RNAi sequence
auaggacagaauaaucagcaac

SEQ ID NO: 12987 - RNA, 22 nt, Artificial Sequence
  Synthesized RNAi sequence
auaggcgugugcuuagaauaua

SEQ ID NO: 12988 - RNA, 22 nt, Artificial Sequence
  Synthesized RNAi sequence
auaguaaaauuuguggguaugg

SEQ ID NO: 12989 - RNA, 22 nt, Artificial Sequence
  Synthesized RNAi sequence
auaguguaggcaaugauggauu

SEQ ID NO: 12990 - RNA, 22 nt, Artificial Sequence
  Synthesized RNAi sequence
auauaccugcaccaauggguau

SEQ ID NO: 12991 - RNA, 22 nt, Artificial Sequence
  Synthesized RNAi sequence
auauacugcucauacuuuccaa

SEQ ID NO: 12992 - RNA, 22 nt, Artificial Sequence
  Synthesized RNAi sequence
auauaggacagaauaaucagca

SEQ ID NO: 12993 - RNA, 22 nt, Artificial Sequence
  Synthesized RNAi sequence
auaucaccaaggcaaucaccau

SEQ ID NO: 12994 - RNA, 22 nt, Artificial Sequence
  Synthesized RNAi sequence
auaucucucucaaaagguuuga

SEQ ID NO: 12995 - RNA, 22 nt, Artificial Sequence
  Synthesized RNAi sequence
auaugaguuguugacauguuca

SEQ ID NO: 12996 - RNA, 22 nt, Artificial Sequence
  Synthesized RNAi sequence
auaugauuguaaaggaaaguaa

SEQ ID NO: 12997 - RNA, 22 nt, Artificial Sequence
  Synthesized RNAi sequence
auaugucugcaaacuuugaagu

SEQ ID NO: 12998 - RNA, 22 nt, Artificial Sequence
  Synthesized RNAi sequence
auauuaggaaaucuaacaauag

SEQ ID NO: 12999 - RNA, 22 nt, Artificial Sequence
  Synthesized RNAi sequence
auauucaaaagugcaauuauuc

SEQ ID NO: 13000 - RNA, 22 nt, Artificial Sequence
  Synthesized RNAi sequence
auauuuaucuaacuccuccuug

SEQ ID NO: 13001 - RNA, 22 nt, Artificial Sequence
  Synthesized RNAi sequence
auauuuuaauagaaaaguccua

SEQ ID NO: 13002 - RNA, 22 nt, Artificial Sequence
  Synthesized RNAi sequence
aucaaaccucuuaguaccauug

SEQ ID NO: 13003 - RNA, 22 nt, Artificial Sequence
  Synthesized RNAi sequence
aucaaauuugcagcaggaucca

SEQ ID NO: 13004 - RNA, 22 nt, Artificial Sequence
  Synthesized RNAi sequence
aucaacaucuggugauguauga

SEQ ID NO: 13005 - RNA, 22 nt, Artificial Sequence
  Synthesized RNAi sequence
aucaaccuaucaauuugcacuu

SEQ ID NO: 13006 - RNA, 22 nt, Artificial Sequence
  Synthesized RNAi sequence
aucaagccagcuauaaaaccua

SEQ ID NO: 13007 - RNA, 22 nt, Artificial Sequence
  Synthesized RNAi sequence
aucaauuugcacuucagccuca

SEQ ID NO: 13008 - RNA, 22 nt, Artificial Sequence
  Synthesized RNAi sequence
aucacaguuaccagacacaaau

SEQ ID NO: 13009 - RNA, 22 nt, Artificial Sequence
  Synthesized RNAi sequence
aucaccaaggcaaucaccauau

SEQ ID NO: 13010 - RNA, 22 nt, Artificial Sequence
  Synthesized RNAi sequence
aucaccacaaauguacauugua

SEQ ID NO: 13011 - RNA, 22 nt, Artificial Sequence
  Synthesized RNAi sequence
aucaccaggagucaaauaacuu

SEQ ID NO: 13012 - RNA, 22 nt, Artificial Sequence
  Synthesized RNAi sequence
aucaccauauuguuugaugaag

SEQ ID NO: 13013 - RNA, 22 nt, Artificial Sequence
  Synthesized RNAi sequence
aucaccucuaauuacaaaugaa

SEQ ID NO: 13014 - RNA, 22 nt, Artificial Sequence
  Synthesized RNAi sequence
aucacgcacuaaauuaauaggc

SEQ ID NO: 13015 - RNA, 22 nt, Artificial Sequence
  Synthesized RNAi sequence
aucacggacagcaucaguagug

SEQ ID NO: 13016 - RNA, 22 nt, Artificial Sequence
  Synthesized RNAi sequence
aucagcaacacaguugcugauu

SEQ ID NO: 13017 - RNA, 22 nt, Artificial Sequence
  Synthesized RNAi sequence
aucagcaaucuuuccaguuugc

SEQ ID NO: 13018 - RNA, 22 nt, Artificial Sequence
  Synthesized RNAi sequence
aucaguagugucagcaaugucu

SEQ ID NO: 13019 - RNA, 22 nt, Artificial Sequence
  Synthesized RNAi sequence
aucauaaacuguguuguugaca

SEQ ID NO: 13020 - RNA, 22 nt, Artificial Sequence
  Synthesized RNAi sequence
aucaucugguaauuuauaauua

SEQ ID NO: 13021 - RNA, 22 nt, Artificial Sequence
  Synthesized RNAi sequence
aucaugacaaauggcaggagca

SEQ ID NO: 13022 - RNA, 22 nt, Artificial Sequence
  Synthesized RNAi sequence
aucauuaaaugguaggacaggg

SEQ ID NO: 13023 - RNA, 22 nt, Artificial Sequence
  Synthesized RNAi sequence
aucauuuaauuuaguaggagac

SEQ ID NO: 13024 - RNA, 22 nt, Artificial Sequence
  Synthesized RNAi sequence
aucauuucaucugugagcaaag

SEQ ID NO: 13025 - RNA, 22 nt, Artificial Sequence
  Synthesized RNAi sequence
auccacaagaacaacagcccuu

SEQ ID NO: 13026 - RNA, 22 nt, Artificial Sequence
  Synthesized RNAi sequence
auccauaaguucguuuaugugu

SEQ ID NO: 13027 - RNA, 22 nt, Artificial Sequence
  Synthesized RNAi sequence
aucgaugagagauucauuuaaa

SEQ ID NO: 13028 - RNA, 22 nt, Artificial Sequence
  Synthesized RNAi sequence
aucuaacaauagauucuguugg

SEQ ID NO: 13029 - RNA, 22 nt, Artificial Sequence
  Synthesized RNAi sequence
aucuaacuccuccuugaaugag

SEQ ID NO: 13030 - RNA, 22 nt, Artificial Sequence
  Synthesized RNAi sequence
aucuacugaugucuuggucaua

SEQ ID NO: 13031 - RNA, 22 nt, Artificial Sequence
  Synthesized RNAi sequence
aucuauacagguaauuauaauu

SEQ ID NO: 13032 - RNA, 22 nt, Artificial Sequence
  Synthesized RNAi sequence
aucucaagugucuguggaucac

SEQ ID NO: 13033 - RNA, 22 nt, Artificial Sequence
  Synthesized RNAi sequence
aucucucucaaaagguuugaga

SEQ ID NO: 13034 - RNA, 22 nt, Artificial Sequence
  Synthesized RNAi sequence
aucugaaaacuuugucagggua

SEQ ID NO: 13035 - RNA, 22 nt, Artificial Sequence
  Synthesized RNAi sequence
aucugcaagugucacuuuguug

SEQ ID NO: 13036 - RNA, 22 nt, Artificial Sequence
  Synthesized RNAi sequence
aucugcaugaauagcaacaggg

SEQ ID NO: 13037 - RNA, 22 nt, Artificial Sequence
  Synthesized RNAi sequence
aucuggugauguaugauucuua

SEQ ID NO: 13038 - RNA, 22 nt, Artificial Sequence
  Synthesized RNAi sequence
aucuguaaugguuccauuuuca

SEQ ID NO: 13039 - RNA, 22 nt, Artificial Sequence
  Synthesized RNAi sequence
aucugugagcaaagguggcaaa

SEQ ID NO: 13040 - RNA, 22 nt, Artificial Sequence
  Synthesized RNAi sequence
aucuucaauaaaugaccucuug

SEQ ID NO: 13041 - RNA, 22 nt, Artificial Sequence
  Synthesized RNAi sequence
aucuugaaguuuuccaagugca

SEQ ID NO: 13042 - RNA, 22 nt, Artificial Sequence
  Synthesized RNAi sequence
aucuuuccaguuugcccuggag

SEQ ID NO: 13043 - RNA, 22 nt, Artificial Sequence
  Synthesized RNAi sequence
augaagccagcaucugcaagug

SEQ ID NO: 13044 - RNA, 22 nt, Artificial Sequence
  Synthesized RNAi sequence
augaauagcaacagggacuucu

SEQ ID NO: 13045 - RNA, 22 nt, Artificial Sequence
  Synthesized RNAi sequence
augaaucugcauagacauuagu

SEQ ID NO: 13046 - RNA, 22 nt, Artificial Sequence
  Synthesized RNAi sequence
augacaaauggcaggagcaguu

SEQ ID NO: 13047 - RNA, 22 nt, Artificial Sequence
  Synthesized RNAi sequence
augaccucuugcuugguuuuga

SEQ ID NO: 13048 - RNA, 22 nt, Artificial Sequence
  Synthesized RNAi sequence
augagagauucauuuaaauucu

SEQ ID NO: 13049 - RNA, 22 nt, Artificial Sequence
  Synthesized RNAi sequence
augaggucucuagcagcaauau

SEQ ID NO: 13050 - RNA, 22 nt, Artificial Sequence
  Synthesized RNAi sequence
augaggugcugacugagggaag

SEQ ID NO: 13051 - RNA, 22 nt, Artificial Sequence
  Synthesized RNAi sequence
augagucuaauucagguugcaa

SEQ ID NO: 13052 - RNA, 22 nt, Artificial Sequence
  Synthesized RNAi sequence
augaguuguugacauguucagc

SEQ ID NO: 13053 - RNA, 22 nt, Artificial Sequence
  Synthesized RNAi sequence
augaugcggaauuauauaggac

SEQ ID NO: 13054 - RNA, 22 nt, Artificial Sequence
  Synthesized RNAi sequence
augauggauugacuagcuacac

SEQ ID NO: 13055 - RNA, 22 nt, Artificial Sequence
  Synthesized RNAi sequence
augcagcaccugcaccaaaggu

SEQ ID NO: 13056 - RNA, 22 nt, Artificial Sequence
  Synthesized RNAi sequence
augccagagaugucaccuaaau

SEQ ID NO: 13057 - RNA, 22 nt, Artificial Sequence
  Synthesized RNAi sequence
augcggaauuauauaggacaga

SEQ ID NO: 13058 - RNA, 22 nt, Artificial Sequence
  Synthesized RNAi sequence
auggaaccaaguaacauuggaa

SEQ ID NO: 13059 - RNA, 22 nt, Artificial Sequence
  Synthesized RNAi sequence
auggauugacuagcuacacuac

SEQ ID NO: 13060 - RNA, 22 nt, Artificial Sequence
  Synthesized RNAi sequence
auggcaauagaguuauuagagu

SEQ ID NO: 13061 - RNA, 22 nt, Artificial Sequence
  Synthesized RNAi sequence
auggcaaucaagccagcuauaa

SEQ ID NO: 13062 - RNA, 22 nt, Artificial Sequence
  Synthesized RNAi sequence
auggcaggagcaguugugaagu

SEQ ID NO: 13063 - RNA, 22 nt, Artificial Sequence
  Synthesized RNAi sequence
auggccauuuuauauacugcuc

SEQ ID NO: 13064 - RNA, 22 nt, Artificial Sequence
  Synthesized RNAi sequence
auggguaugucacacucauaug

SEQ ID NO: 13065 - RNA, 22 nt, Artificial Sequence
  Synthesized RNAi sequence
augguaggacaggguuaucaaa

SEQ ID NO: 13066 - RNA, 22 nt, Artificial Sequence
  Synthesized RNAi sequence
augguauuuguaaugcagcacc

SEQ ID NO: 13067 - RNA, 22 nt, Artificial Sequence
  Synthesized RNAi sequence
augguguaaugucaagaaucuc

SEQ ID NO: 13068 - RNA, 22 nt, Artificial Sequence
  Synthesized RNAi sequence
augguuccauuuucauuauauu

SEQ ID NO: 13069 - RNA, 22 nt, Artificial Sequence
  Synthesized RNAi sequence
augguugguaaccaacaccauu

SEQ ID NO: 13070 - RNA, 22 nt, Artificial Sequence
  Synthesized RNAi sequence
auguaaagcaaguaaaguuuga

SEQ ID NO: 13071 - RNA, 22 nt, Artificial Sequence
  Synthesized RNAi sequence
auguaauuugacuccuuugagc

SEQ ID NO: 13072 - RNA, 22 nt, Artificial Sequence
  Synthesized RNAi sequence
auguacauuguacaaucuacug

SEQ ID NO: 13073 - RNA, 22 nt, Artificial Sequence
  Synthesized RNAi sequence
auguaccauggccauuuuauau

SEQ ID NO: 13074 - RNA, 22 nt, Artificial Sequence
  Synthesized RNAi sequence
auguagaaguucaaaagaaagu

SEQ ID NO: 13075 - RNA, 22 nt, Artificial Sequence
  Synthesized RNAi sequence
auguauagcauggaaccaagua

SEQ ID NO: 13076 - RNA, 22 nt, Artificial Sequence
  Synthesized RNAi sequence
augucaagaaucucaagugucu

SEQ ID NO: 13077 - RNA, 22 nt, Artificial Sequence
  Synthesized RNAi sequence
augucacacucauaugaguugu

SEQ ID NO: 13078 - RNA, 22 nt, Artificial Sequence
  Synthesized RNAi sequence
augucaccuaaaucaacaucug

SEQ ID NO: 13079 - RNA, 22 nt, Artificial Sequence
  Synthesized RNAi sequence
augucucugccaaauuguugga

SEQ ID NO: 13080 - RNA, 22 nt, Artificial Sequence
  Synthesized RNAi sequence
augucugcaaacuuugaagucu

SEQ ID NO: 13081 - RNA, 22 nt, Artificial Sequence
  Synthesized RNAi sequence
augucuuggucauagacacugg

SEQ ID NO: 13082 - RNA, 22 nt, Artificial Sequence
  Synthesized RNAi sequence
auguguaauguaauuugacucc

SEQ ID NO: 13083 - RNA, 22 nt, Artificial Sequence
  Synthesized RNAi sequence
auguguugucuguaguaaugau

SEQ ID NO: 13084 - RNA, 22 nt, Artificial Sequence
  Synthesized RNAi sequence
auguuaauaccuauuggcaaau

SEQ ID NO: 13085 - RNA, 22 nt, Artificial Sequence
  Synthesized RNAi sequence
auguuagacuucucaguggaag

SEQ ID NO: 13086 - RNA, 22 nt, Artificial Sequence
  Synthesized RNAi sequence
auguucagccccuauuaaacag

SEQ ID NO: 13087 - RNA, 22 nt, Artificial Sequence
  Synthesized RNAi sequence
auuaaaaccuucaacaccauua

SEQ ID NO: 13088 - RNA, 22 nt, Artificial Sequence
  Synthesized RNAi sequence
auuaaaccuauaagccauuugc

SEQ ID NO: 13089 - RNA, 22 nt, Artificial Sequence
  Synthesized RNAi sequence
auuaaaugguaggacaggguua

SEQ ID NO: 13090 - RNA, 22 nt, Artificial Sequence
  Synthesized RNAi sequence
auuaacaauaaguagggacugg

SEQ ID NO: 13091 - RNA, 22 nt, Artificial Sequence
  Synthesized RNAi sequence
auuaacacacugacuagagacu

SEQ ID NO: 13092 - RNA, 22 nt, Artificial Sequence
  Synthesized RNAi sequence
auuaauaggcgugugcuuagaa

SEQ ID NO: 13093 - RNA, 22 nt, Artificial Sequence
  Synthesized RNAi sequence
auuaaugccagagaugucaccu

SEQ ID NO: 13094 - RNA, 22 nt, Artificial Sequence
  Synthesized RNAi sequence
auuaauuguugagucacauaug

SEQ ID NO: 13095 - RNA, 22 nt, Artificial Sequence
  Synthesized RNAi sequence
auuacaacaucacaguuaccag

SEQ ID NO: 13096 - RNA, 22 nt, Artificial Sequence
  Synthesized RNAi sequence
auuacaaggugugcuaccggcc

SEQ ID NO: 13097 - RNA, 22 nt, Artificial Sequence
  Synthesized RNAi sequence
auuaccaccaaccuuagaauca

SEQ ID NO: 13098 - RNA, 22 nt, Artificial Sequence
  Synthesized RNAi sequence
auuacuauggcaaucaagccag

SEQ ID NO: 13099 - RNA, 22 nt, Artificial Sequence
  Synthesized RNAi sequence
auuagacuuccuaaacaaucua

SEQ ID NO: 13100 - RNA, 22 nt, Artificial Sequence
  Synthesized RNAi sequence
auuagaguaagcaacugaauuu

SEQ ID NO: 13101 - RNA, 22 nt, Artificial Sequence
  Synthesized RNAi sequence
auuagcagaagcucugauuucu

SEQ ID NO: 13102 - RNA, 22 nt, Artificial Sequence
  Synthesized RNAi sequence
auuaggaaaucuaacaauagau

SEQ ID NO: 13103 - RNA, 22 nt, Artificial Sequence
  Synthesized RNAi sequence
auuaguaaagcagagaucauuu

SEQ ID NO: 13104 - RNA, 22 nt, Artificial Sequence
  Synthesized RNAi sequence
auuaguagcguuauuaacaaua

SEQ ID NO: 13105 - RNA, 22 nt, Artificial Sequence
  Synthesized RNAi sequence
auuagucugagucugauaacua

SEQ ID NO: 13106 - RNA, 22 nt, Artificial Sequence
  Synthesized RNAi sequence
auuaguggguuggaaaccauau

SEQ ID NO: 13107 - RNA, 22 nt, Artificial Sequence
  Synthesized RNAi sequence
auuauaaucagcaaucuuucca

SEQ ID NO: 13108 - RNA, 22 nt, Artificial Sequence
  Synthesized RNAi sequence
auuauaauuaccaccaaccuua

SEQ ID NO: 13109 - RNA, 22 nt, Artificial Sequence
  Synthesized RNAi sequence
auuauauaggacagaauaauca

SEQ ID NO: 13110 - RNA, 22 nt, Artificial Sequence
  Synthesized RNAi sequence
auuauucgcacuagaauaaacu

SEQ ID NO: 13111 - RNA, 22 nt, Artificial Sequence
  Synthesized RNAi sequence
auucaaaagugcaauuauucgc

SEQ ID NO: 13112 - RNA, 22 nt, Artificial Sequence
  Synthesized RNAi sequence
auucacagacuuuaauaacaac

SEQ ID NO: 13113 - RNA, 22 nt, Artificial Sequence
  Synthesized RNAi sequence
auucagguugcaaaggaucaua

SEQ ID NO: 13114 - RNA, 22 nt, Artificial Sequence
  Synthesized RNAi sequence
auucaguugaaucaccacaaau

SEQ ID NO: 13115 - RNA, 22 nt, Artificial Sequence
  Synthesized RNAi sequence
auucauuuaaauucuuggcaac

SEQ ID NO: 13116 - RNA, 22 nt, Artificial Sequence
  Synthesized RNAi sequence
auuccuauuacaacaucacagu

SEQ ID NO: 13117 - RNA, 22 nt, Artificial Sequence
  Synthesized RNAi sequence
auucgcacuagaauaaacucug

SEQ ID NO: 13118 - RNA, 22 nt, Artificial Sequence
  Synthesized RNAi sequence
auucucuuccuguuccaagcau

SEQ ID NO: 13119 - RNA, 22 nt, Artificial Sequence
  Synthesized RNAi sequence
auucuguguaacuccaauacca

SEQ ID NO: 13120 - RNA, 22 nt, Artificial Sequence
  Synthesized RNAi sequence
auucuguugguuggacucuaaa

SEQ ID NO: 13121 - RNA, 22 nt, Artificial Sequence
  Synthesized RNAi sequence
auucuuggcaaccucauugagg

SEQ ID NO: 13122 - RNA, 22 nt, Artificial Sequence
  Synthesized RNAi sequence
auugaaauucacagacuuuaau

SEQ ID NO: 13123 - RNA, 22 nt, Artificial Sequence
  Synthesized RNAi sequence
auugacuagcuacacuacgugc

SEQ ID NO: 13124 - RNA, 22 nt, Artificial Sequence
  Synthesized RNAi sequence
auugagcaaucauuucaucugu

SEQ ID NO: 13125 - RNA, 22 nt, Artificial Sequence
  Synthesized RNAi sequence
auugcaccaaaauuggagcuaa

SEQ ID NO: 13126 - RNA, 22 nt, Artificial Sequence
  Synthesized RNAi sequence
auugcugcauucaguugaauca

SEQ ID NO: 13127 - RNA, 22 nt, Artificial Sequence
  Synthesized RNAi sequence
auuggaaaagaaagguaagaac

SEQ ID NO: 13128 - RNA, 22 nt, Artificial Sequence
  Synthesized RNAi sequence
auuggagcuaaguuguuuaaca

SEQ ID NO: 13129 - RNA, 22 nt, Artificial Sequence
  Synthesized RNAi sequence
auuggucccagagacauguaua

SEQ ID NO: 13130 - RNA, 22 nt, Artificial Sequence
  Synthesized RNAi sequence
auuggugguguuuuguaaauuu

SEQ ID NO: 13131 - RNA, 22 nt, Artificial Sequence
  Synthesized RNAi sequence
auuguacaaucuacugaugucu

SEQ ID NO: 13132 - RNA, 22 nt, Artificial Sequence
  Synthesized RNAi sequence
auuguacccgcuaacagugcag

SEQ ID NO: 13133 - RNA, 22 nt, Artificial Sequence
  Synthesized RNAi sequence
auugucaccauuacuauggcaa

SEQ ID NO: 13134 - RNA, 22 nt, Artificial Sequence
  Synthesized RNAi sequence
auuguugagucacauaugucug

SEQ ID NO: 13135 - RNA, 22 nt, Artificial Sequence
  Synthesized RNAi sequence
auuuaaaacacuugaaauugca

SEQ ID NO: 13136 - RNA, 22 nt, Artificial Sequence
  Synthesized RNAi sequence
auuuaaauucuuggcaaccuca

SEQ ID NO: 13137 - RNA, 22 nt, Artificial Sequence
  Synthesized RNAi sequence
auuuaauuuaguaggagacacu

SEQ ID NO: 13138 - RNA, 22 nt, Artificial Sequence
  Synthesized RNAi sequence
auuuaguaggagacacuccaua

SEQ ID NO: 13139 - RNA, 22 nt, Artificial Sequence
  Synthesized RNAi sequence
auuuaucuaacuccuccuugaa

SEQ ID NO: 13140 - RNA, 22 nt, Artificial Sequence
  Synthesized RNAi sequence
auuucaacguacacuuuguuuc

SEQ ID NO: 13141 - RNA, 22 nt, Artificial Sequence
  Synthesized RNAi sequence
auuucaguugaaauaucucucu

SEQ ID NO: 13142 - RNA, 22 nt, Artificial Sequence
  Synthesized RNAi sequence
auuucaucugugagcaaaggug

SEQ ID NO: 13143 - RNA, 22 nt, Artificial Sequence
  Synthesized RNAi sequence
auuucugcagcucuaauuaauu

SEQ ID NO: 13144 - RNA, 22 nt, Artificial Sequence
  Synthesized RNAi sequence
auuucugugguaacacuaauag

SEQ ID NO: 13145 - RNA, 22 nt, Artificial Sequence
  Synthesized RNAi sequence
auuugaaacaaagacaccuuca

SEQ ID NO: 13146 - RNA, 22 nt, Artificial Sequence
  Synthesized RNAi sequence
auuugacuccuuugagcacugg

SEQ ID NO: 13147 - RNA, 22 nt, Artificial Sequence
  Synthesized RNAi sequence
auuugcacuucagccucaacuu

SEQ ID NO: 13148 - RNA, 22 nt, Artificial Sequence
  Synthesized RNAi sequence
auuugcagcaggauccacaaga

SEQ ID NO: 13149 - RNA, 22 nt, Artificial Sequence
  Synthesized RNAi sequence
auuugcauagcaaaugguauuu

SEQ ID NO: 13150 - RNA, 22 nt, Artificial Sequence
  Synthesized RNAi sequence
auuuguaaugcagcaccugcac

SEQ ID NO: 13151 - RNA, 22 nt, Artificial Sequence
  Synthesized RNAi sequence
auuugucugacuucaucaccuc

SEQ ID NO: 13152 - RNA, 22 nt, Artificial Sequence
  Synthesized RNAi sequence
auuuguuccugguguuauaaca

SEQ ID NO: 13153 - RNA, 22 nt, Artificial Sequence
  Synthesized RNAi sequence
auuuuaauagaaaaguccuagg

SEQ ID NO: 13154 - RNA, 22 nt, Artificial Sequence
  Synthesized RNAi sequence
auuuuaguagcagcaagauuag

SEQ ID NO: 13155 - RNA, 22 nt, Artificial Sequence
  Synthesized RNAi sequence
auuuuauauacugcucauacuu

SEQ ID NO: 13156 - RNA, 22 nt, Artificial Sequence
  Synthesized RNAi sequence
auuuucugcaccaagugacaua

SEQ ID NO: 13157 - RNA, 22 nt, Artificial Sequence
  Synthesized RNAi sequence
auuuugccaauagcacuauuaa

SEQ ID NO: 13158 - RNA, 22 nt, Artificial Sequence
  Synthesized RNAi sequence
auuuugguugaccacaucuuga

SEQ ID NO: 13159 - RNA, 22 nt, Artificial Sequence
  Synthesized RNAi sequence
uaaaacacuugaaauugcacca

SEQ ID NO: 13160 - RNA, 22 nt, Artificial Sequence
  Synthesized RNAi sequence
uaaaaccuagccaaauguacca

SEQ ID NO: 13161 - RNA, 22 nt, Artificial Sequence
  Synthesized RNAi sequence
uaaaaccuucaacaccauuaca

SEQ ID NO: 13162 - RNA, 22 nt, Artificial Sequence
  Synthesized RNAi sequence
uaaaacugaggaucugaaaacu

SEQ ID NO: 13163 - RNA, 22 nt, Artificial Sequence
  Synthesized RNAi sequence
uaaaaguggaaaaugaugcgga

SEQ ID NO: 13164 - RNA, 22 nt, Artificial Sequence
  Synthesized RNAi sequence
uaaaauaaccaucaauauucuu

SEQ ID NO: 13165 - RNA, 22 nt, Artificial Sequence
  Synthesized RNAi sequence
uaaaauauuuaucuaacuccuc

SEQ ID NO: 13166 - RNA, 22 nt, Artificial Sequence
  Synthesized RNAi sequence
uaaacaaauccauaaguucguu

SEQ ID NO: 13167 - RNA, 22 nt, Artificial Sequence
  Synthesized RNAi sequence
uaaacaaucuauacagguaauu

SEQ ID NO: 13168 - RNA, 22 nt, Artificial Sequence
  Synthesized RNAi sequence
uaaacaccacgugugaaagaau

SEQ ID NO: 13169 - RNA, 22 nt, Artificial Sequence
  Synthesized RNAi sequence
uaaacaccaucauuaaauggua

SEQ ID NO: 13170 - RNA, 22 nt, Artificial Sequence
  Synthesized RNAi sequence
uaaacacgccaaguaggaguaa

SEQ ID NO: 13171 - RNA, 22 nt, Artificial Sequence
  Synthesized RNAi sequence
uaaaccuauaagccauuugcau

SEQ ID NO: 13172 - RNA, 22 nt, Artificial Sequence
  Synthesized RNAi sequence
uaaacucugaacucacuuucca

SEQ ID NO: 13173 - RNA, 22 nt, Artificial Sequence
  Synthesized RNAi sequence
uaaacuguguuguugacaauuc

SEQ ID NO: 13174 - RNA, 22 nt, Artificial Sequence
  Synthesized RNAi sequence
uaaacuuuugugcacaaaugag

SEQ ID NO: 13175 - RNA, 22 nt, Artificial Sequence
  Synthesized RNAi sequence
uaaagaacagcaaccugguuag

SEQ ID NO: 13176 - RNA, 22 nt, Artificial Sequence
  Synthesized RNAi sequence
uaaagcagagaucauuuaauuu

SEQ ID NO: 13177 - RNA, 22 nt, Artificial Sequence
  Synthesized RNAi sequence
uaaagcuugugcauuuugguug

SEQ ID NO: 13178 - RNA, 22 nt, Artificial Sequence
  Synthesized RNAi sequence
uaaaguuugaaaccuagugaug

SEQ ID NO: 13179 - RNA, 22 nt, Artificial Sequence
  Synthesized RNAi sequence
uaaaucaacaucuggugaugua

SEQ ID NO: 13180 - RNA, 22 nt, Artificial Sequence
  Synthesized RNAi sequence
uaaaugaccucuugcuugguuu

SEQ ID NO: 13181 - RNA, 22 nt, Artificial Sequence
  Synthesized RNAi sequence
uaaaugguaggacaggguuauc

SEQ ID NO: 13182 - RNA, 22 nt, Artificial Sequence
  Synthesized RNAi sequence
uaaauucuuggcaaccucauug

SEQ ID NO: 13183 - RNA, 22 nt, Artificial Sequence
  Synthesized RNAi sequence
uaacaacauuaguagcguuauu

SEQ ID NO: 13184 - RNA, 22 nt, Artificial Sequence
  Synthesized RNAi sequence
uaacaagcguguuuaaagcuug

SEQ ID NO: 13185 - RNA, 22 nt, Artificial Sequence
  Synthesized RNAi sequence
uaacaauaaguagggacugggu

SEQ ID NO: 13186 - RNA, 22 nt, Artificial Sequence
  Synthesized RNAi sequence
uaacaauagauucuguugguug

SEQ ID NO: 13187 - RNA, 22 nt, Artificial Sequence
  Synthesized RNAi sequence
uaacaauuaaaaccuucaacac

SEQ ID NO: 13188 - RNA, 22 nt, Artificial Sequence
  Synthesized RNAi sequence
uaacacacugacuagagacuag

SEQ ID NO: 13189 - RNA, 22 nt, Artificial Sequence
  Synthesized RNAi sequence
uaacacuaauaguaaaauuugu

SEQ ID NO: 13190 - RNA, 22 nt, Artificial Sequence
  Synthesized RNAi sequence
uaacacugacaccaccaaaaga

SEQ ID NO: 13191 - RNA, 22 nt, Artificial Sequence
  Synthesized RNAi sequence
uaacacuuaaaaguggaaaaug

SEQ ID NO: 13192 - RNA, 22 nt, Artificial Sequence
  Synthesized RNAi sequence
uaacagugcagaaguguauuga

SEQ ID NO: 13193 - RNA, 22 nt, Artificial Sequence
  Synthesized RNAi sequence
uaacauccugauaaagaacagc

SEQ ID NO: 13194 - RNA, 22 nt, Artificial Sequence
  Synthesized RNAi sequence
uaacauuggaaaagaaagguaa

SEQ ID NO: 13195 - RNA, 22 nt, Artificial Sequence
  Synthesized RNAi sequence
uaaccaacaccauuaguggguu

SEQ ID NO: 13196 - RNA, 22 nt, Artificial Sequence
  Synthesized RNAi sequence
uaaccaucaauauucuuaaaca

SEQ ID NO: 13197 - RNA, 22 nt, Artificial Sequence
  Synthesized RNAi sequence
uaacccacauaauaagcugcag

SEQ ID NO: 13198 - RNA, 22 nt, Artificial Sequence
  Synthesized RNAi sequence
uaacuagcgcauauaccugcac

SEQ ID NO: 13199 - RNA, 22 nt, Artificial Sequence
  Synthesized RNAi sequence
uaacuccaauaccauuaaaccu

SEQ ID NO: 13200 - RNA, 22 nt, Artificial Sequence
  Synthesized RNAi sequence
uaacuccuccuugaaugagucu

SEQ ID NO: 13201 - RNA, 22 nt, Artificial Sequence
  Synthesized RNAi sequence
uaacuucuauguaaagcaagua

SEQ ID NO: 13202 - RNA, 22 nt, Artificial Sequence
  Synthesized RNAi sequence
uaagaaaaggcugagagacaua

SEQ ID NO: 13203 - RNA, 22 nt, Artificial Sequence
  Synthesized RNAi sequence
uaagaacaaguccugaguugaa

SEQ ID NO: 13204 - RNA, 22 nt, Artificial Sequence
  Synthesized RNAi sequence
uaagaacaccugugccuguuaa

SEQ ID NO: 13205 - RNA, 22 nt, Artificial Sequence
  Synthesized RNAi sequence
uaagauuaacacacugacuaga

SEQ ID NO: 13206 - RNA, 22 nt, Artificial Sequence
  Synthesized RNAi sequence
uaagcaacugaauuuucugcac

SEQ ID NO: 13207 - RNA, 22 nt, Artificial Sequence
  Synthesized RNAi sequence
uaagccauuugcauagcaaaug

SEQ ID NO: 13208 - RNA, 22 nt, Artificial Sequence
  Synthesized RNAi sequence
uaaggccguuaaacuuuugugc

SEQ ID NO: 13209 - RNA, 22 nt, Artificial Sequence
  Synthesized RNAi sequence
uaaguagggacugggucuucga

SEQ ID NO: 13210 - RNA, 22 nt, Artificial Sequence
  Synthesized RNAi sequence
uaagucacaugcaagaagacua

SEQ ID NO: 13211 - RNA, 22 nt, Artificial Sequence
  Synthesized RNAi sequence
uaaguucguuuauguguaaugu

SEQ ID NO: 13212 - RNA, 22 nt, Artificial Sequence
  Synthesized RNAi sequence
uaaguugaucugcaugaauagc

SEQ ID NO: 13213 - RNA, 22 nt, Artificial Sequence
  Synthesized RNAi sequence
uaaguuguuuaacaagcguguu

SEQ ID NO: 13214 - RNA, 22 nt, Artificial Sequence
  Synthesized RNAi sequence
uaauaaacaccacgugugaaag

SEQ ID NO: 13215 - RNA, 22 nt, Artificial Sequence
  Synthesized RNAi sequence
uaauaacaacauuaguagcguu

SEQ ID NO: 13216 - RNA, 22 nt, Artificial Sequence
  Synthesized RNAi sequence
uaauaagcugcagcaccagcug

SEQ ID NO: 13217 - RNA, 22 nt, Artificial Sequence
  Synthesized RNAi sequence
uaauaccuauuggcaaaucuac

SEQ ID NO: 13218 - RNA, 22 nt, Artificial Sequence
  Synthesized RNAi sequence
uaauagaaaaguccuagguuga

SEQ ID NO: 13219 - RNA, 22 nt, Artificial Sequence
  Synthesized RNAi sequence
uaauaggcgugugcuuagaaua

SEQ ID NO: 13220 - RNA, 22 nt, Artificial Sequence
  Synthesized RNAi sequence
uaauaguaaaauuuguggguau

SEQ ID NO: 13221 - RNA, 22 nt, Artificial Sequence
  Synthesized RNAi sequence
uaaucagcaacacaguugcuga

SEQ ID NO: 13222 - RNA, 22 nt, Artificial Sequence
  Synthesized RNAi sequence
uaaucagcaaucuuuccaguuu

SEQ ID NO: 13223 - RNA, 22 nt, Artificial Sequence
  Synthesized RNAi sequence
uaaugcagcaccugcaccaaag

SEQ ID NO: 13224 - RNA, 22 nt, Artificial Sequence
  Synthesized RNAi sequence
uaaugccagagaugucaccuaa

SEQ ID NO: 13225 - RNA, 22 nt, Artificial Sequence
  Synthesized RNAi sequence
uaaugguuccauuuucauuaua

SEQ ID NO: 13226 - RNA, 22 nt, Artificial Sequence
  Synthesized RNAi sequence
uaaugucaagaaucucaagugu

SEQ ID NO: 13227 - RNA, 22 nt, Artificial Sequence
  Synthesized RNAi sequence
uaauuaauuguugagucacaua

SEQ ID NO: 13228 - RNA, 22 nt, Artificial Sequence
  Synthesized RNAi sequence
uaauuacaaaugaaucugcaua

SEQ ID NO: 13229 - RNA, 22 nt, Artificial Sequence
  Synthesized RNAi sequence
uaauuaccaccaaccuuagaau

SEQ ID NO: 13230 - RNA, 22 nt, Artificial Sequence
  Synthesized RNAi sequence
uaauuauaaucagcaaucuuuc

SEQ ID NO: 13231 - RNA, 22 nt, Artificial Sequence
  Synthesized RNAi sequence
uaauuauaauuaccaccaaccu

SEQ ID NO: 13232 - RNA, 22 nt, Artificial Sequence
  Synthesized RNAi sequence
uaauucagguugcaaaggauca

SEQ ID NO: 13233 - RNA, 22 nt, Artificial Sequence
  Synthesized RNAi sequence
uaauuggugguguuuuguaaau

SEQ ID NO: 13234 - RNA, 22 nt, Artificial Sequence
  Synthesized RNAi sequence
uaauugucaccauuacuauggc

SEQ ID NO: 13235 - RNA, 22 nt, Artificial Sequence
  Synthesized RNAi sequence
uaauuguugagucacauauguc

SEQ ID NO: 13236 - RNA, 22 nt, Artificial Sequence
  Synthesized RNAi sequence
uaauuuaguaggagacacucca

SEQ ID NO: 13237 - RNA, 22 nt, Artificial Sequence
  Synthesized RNAi sequence
uaauuugacuccuuugagcacu

SEQ ID NO: 13238 - RNA, 22 nt, Artificial Sequence
  Synthesized RNAi sequence
uacaaaccagugugugccauuu

SEQ ID NO: 13239 - RNA, 22 nt, Artificial Sequence
  Synthesized RNAi sequence
uacaacaucacaguuaccagac

SEQ ID NO: 13240 - RNA, 22 nt, Artificial Sequence
  Synthesized RNAi sequence
uacaaggugugcuaccggccug

SEQ ID NO: 13241 - RNA, 22 nt, Artificial Sequence
  Synthesized RNAi sequence
uacaaucuacugaugucuuggu

SEQ ID NO: 13242 - RNA, 22 nt, Artificial Sequence
  Synthesized RNAi sequence
uacaccaugaggugcugacuga

SEQ ID NO: 13243 - RNA, 22 nt, Artificial Sequence
  Synthesized RNAi sequence
uacacuuuguuucugagagagg

SEQ ID NO: 13244 - RNA, 22 nt, Artificial Sequence
  Synthesized RNAi sequence
uacagcaaagcauaauugucac

SEQ ID NO: 13245 - RNA, 22 nt, Artificial Sequence
  Synthesized RNAi sequence
uacagcaacuggucauacagca

SEQ ID NO: 13246 - RNA, 22 nt, Artificial Sequence
  Synthesized RNAi sequence
uacagcaucuguaaugguucca

SEQ ID NO: 13247 - RNA, 22 nt, Artificial Sequence
  Synthesized RNAi sequence
uacagguaauuauaauuaccac

SEQ ID NO: 13248 - RNA, 22 nt, Artificial Sequence
  Synthesized RNAi sequence
uacauuguacaaucuacugaug

SEQ ID NO: 13249 - RNA, 22 nt, Artificial Sequence
  Synthesized RNAi sequence
uaccagacacaaauguguuguc

SEQ ID NO: 13250 - RNA, 22 nt, Artificial Sequence
  Synthesized RNAi sequence
uaccauggccauuuuauauacu

SEQ ID NO: 13251 - RNA, 22 nt, Artificial Sequence
  Synthesized RNAi sequence
uaccauuaaaccuauaagccau

SEQ ID NO: 13252 - RNA, 22 nt, Artificial Sequence
  Synthesized RNAi sequence
uaccauuggucccagagacaug

SEQ ID NO: 13253 - RNA, 22 nt, Artificial Sequence
  Synthesized RNAi sequence
uacccgcuaacagugcagaagu

SEQ ID NO: 13254 - RNA, 22 nt, Artificial Sequence
  Synthesized RNAi sequence
uaccggccugauagauuucagu

SEQ ID NO: 13255 - RNA, 22 nt, Artificial Sequence
  Synthesized RNAi sequence
uaccuauuggcaaaucuaccaa

SEQ ID NO: 13256 - RNA, 22 nt, Artificial Sequence
  Synthesized RNAi sequence
uaccugcaccaauggguauguc

SEQ ID NO: 13257 - RNA, 22 nt, Artificial Sequence
  Synthesized RNAi sequence
uacgugcccgccgaggagaauu

SEQ ID NO: 13258 - RNA, 22 nt, Artificial Sequence
  Synthesized RNAi sequence
uacuacuacucuguaugguugg

SEQ ID NO: 13259 - RNA, 22 nt, Artificial Sequence
  Synthesized RNAi sequence
uacuacucuguaugguugguaa

SEQ ID NO: 13260 - RNA, 22 nt, Artificial Sequence
  Synthesized RNAi sequence
uacuauggcaaucaagccagcu

SEQ ID NO: 13261 - RNA, 22 nt, Artificial Sequence
  Synthesized RNAi sequence
uacucuguaugguugguaacca

SEQ ID NO: 13262 - RNA, 22 nt, Artificial Sequence
  Synthesized RNAi sequence
uacugaugucuuggucauagac

SEQ ID NO: 13263 - RNA, 22 nt, Artificial Sequence
  Synthesized RNAi sequence
uacugcucauacuuuccaaguu

SEQ ID NO: 13264 - RNA, 22 nt, Artificial Sequence
  Synthesized RNAi sequence
uacuuuccaaguucuuggagau

SEQ ID NO: 13265 - RNA, 22 nt, Artificial Sequence
  Synthesized RNAi sequence
uagaaaaguccuagguugaaga

SEQ ID NO: 13266 - RNA, 22 nt, Artificial Sequence
  Synthesized RNAi sequence
uagaaguauuuguuccuggugu

SEQ ID NO: 13267 - RNA, 22 nt, Artificial Sequence
  Synthesized RNAi sequence
uagaaguucaaaagaaaguacu

SEQ ID NO: 13268 - RNA, 22 nt, Artificial Sequence
  Synthesized RNAi sequence
uagaauaaacacgccaaguagg

SEQ ID NO: 13269 - RNA, 22 nt, Artificial Sequence
  Synthesized RNAi sequence
uagaauaaacucugaacucacu

SEQ ID NO: 13270 - RNA, 22 nt, Artificial Sequence
  Synthesized RNAi sequence
uagaauuucugugguaacacua

SEQ ID NO: 13271 - RNA, 22 nt, Artificial Sequence
  Synthesized RNAi sequence
uagacacugguagaauuucugu

SEQ ID NO: 13272 - RNA, 22 nt, Artificial Sequence
  Synthesized RNAi sequence
uagacauuaguaaagcagagau

SEQ ID NO: 13273 - RNA, 22 nt, Artificial Sequence
  Synthesized RNAi sequence
uagacuuccuaaacaaucuaua

SEQ ID NO: 13274 - RNA, 22 nt, Artificial Sequence
  Synthesized RNAi sequence
uagacuucucaguggaagcaaa

SEQ ID NO: 13275 - RNA, 22 nt, Artificial Sequence
  Synthesized RNAi sequence
uagaguuauuagaguaagcaac

SEQ ID NO: 13276 - RNA, 22 nt, Artificial Sequence
  Synthesized RNAi sequence
uagaucuucaauaaaugaccuc

SEQ ID NO: 13277 - RNA, 22 nt, Artificial Sequence
  Synthesized RNAi sequence
uagauucuguugguuggacucu

SEQ ID NO: 13278 - RNA, 22 nt, Artificial Sequence
  Synthesized RNAi sequence
uagauuucaguugaaauaucuc

SEQ ID NO: 13279 - RNA, 22 nt, Artificial Sequence
  Synthesized RNAi sequence
uagcaaaugguauuuguaaugc

SEQ ID NO: 13280 - RNA, 22 nt, Artificial Sequence
  Synthesized RNAi sequence
uagcagaagcucugauuucugc

SEQ ID NO: 13281 - RNA, 22 nt, Artificial Sequence
  Synthesized RNAi sequence
uagcagcaagauuagcagaagc

SEQ ID NO: 13282 - RNA, 22 nt, Artificial Sequence
  Synthesized RNAi sequence
uagcagcaauaucaccaaggca

SEQ ID NO: 13283 - RNA, 22 nt, Artificial Sequence
  Synthesized RNAi sequence
uagcauggaaccaaguaacauu

SEQ ID NO: 13284 - RNA, 22 nt, Artificial Sequence
  Synthesized RNAi sequence
uagccaaauguaccauggccau

SEQ ID NO: 13285 - RNA, 22 nt, Artificial Sequence
  Synthesized RNAi sequence
uagcguuauuaacaauaaguag

SEQ ID NO: 13286 - RNA, 22 nt, Artificial Sequence
  Synthesized RNAi sequence
uaggaaaucuaacaauagauuc

SEQ ID NO: 13287 - RNA, 22 nt, Artificial Sequence
  Synthesized RNAi sequence
uaggacagaauaaucagcaaca

SEQ ID NO: 13288 - RNA, 22 nt, Artificial Sequence
  Synthesized RNAi sequence
uaggacaggguuaucaaaccuc

SEQ ID NO: 13289 - RNA, 22 nt, Artificial Sequence
  Synthesized RNAi sequence
uaggagacacuccauaacacuu

SEQ ID NO: 13290 - RNA, 22 nt, Artificial Sequence
  Synthesized RNAi sequence
uaggaguaaguugaucugcaug

SEQ ID NO: 13291 - RNA, 22 nt, Artificial Sequence
  Synthesized RNAi sequence
uaggcaaugauggauugacuag

SEQ ID NO: 13292 - RNA, 22 nt, Artificial Sequence
  Synthesized RNAi sequence
uaggcgugugcuuagaauauau

SEQ ID NO: 13293 - RNA, 22 nt, Artificial Sequence
  Synthesized RNAi sequence
uagggacugggucuucgaaucu

SEQ ID NO: 13294 - RNA, 22 nt, Artificial Sequence
  Synthesized RNAi sequence
uagguugaagauaacccacaua

SEQ ID NO: 13295 - RNA, 22 nt, Artificial Sequence
  Synthesized RNAi sequence
uaguaaaauuuguggguauggc

SEQ ID NO: 13296 - RNA, 22 nt, Artificial Sequence
  Synthesized RNAi sequence
uaguaaagcagagaucauuuaa

SEQ ID NO: 13297 - RNA, 22 nt, Artificial Sequence
  Synthesized RNAi sequence
uaguaccauuggucccagagac

SEQ ID NO: 13298 - RNA, 22 nt, Artificial Sequence
  Synthesized RNAi sequence
uaguagcagcaagauuagcaga

SEQ ID NO: 13299 - RNA, 22 nt, Artificial Sequence
  Synthesized RNAi sequence
uaguagcguuauuaacaauaag

SEQ ID NO: 13300 - RNA, 22 nt, Artificial Sequence
  Synthesized RNAi sequence
uaguaggagacacuccauaaca

SEQ ID NO: 13301 - RNA, 22 nt, Artificial Sequence
  Synthesized RNAi sequence
uagucugagucugauaacuagc

SEQ ID NO: 13302 - RNA, 22 nt, Artificial Sequence
  Synthesized RNAi sequence
uagugauguuaauaccuauugg

SEQ ID NO: 13303 - RNA, 22 nt, Artificial Sequence
  Synthesized RNAi sequence
uaguggguuggaaaccauauga

SEQ ID NO: 13304 - RNA, 22 nt, Artificial Sequence
  Synthesized RNAi sequence
uagugucagcaaugucucugcc

SEQ ID NO: 13305 - RNA, 22 nt, Artificial Sequence
  Synthesized RNAi sequence
uauaagccauuugcauagcaaa

SEQ ID NO: 13306 - RNA, 22 nt, Artificial Sequence
  Synthesized RNAi sequence
uauaaucagcaaucuuuccagu

SEQ ID NO: 13307 - RNA, 22 nt, Artificial Sequence
  Synthesized RNAi sequence
uauaauuaccaccaaccuuaga

SEQ ID NO: 13308 - RNA, 22 nt, Artificial Sequence
  Synthesized RNAi sequence
uauaauuauaaucagcaaucuu

SEQ ID NO: 13309 - RNA, 22 nt, Artificial Sequence
  Synthesized RNAi sequence
uauacagguaauuauaauuacc

SEQ ID NO: 13310 - RNA, 22 nt, Artificial Sequence
  Synthesized RNAi sequence
uauaccugcaccaauggguaug

SEQ ID NO: 13311 - RNA, 22 nt, Artificial Sequence
  Synthesized RNAi sequence
uauacugcucauacuuuccaag

SEQ ID NO: 13312 - RNA, 22 nt, Artificial Sequence
  Synthesized RNAi sequence
uauagcauggaaccaaguaaca

SEQ ID NO: 13313 - RNA, 22 nt, Artificial Sequence
  Synthesized RNAi sequence
uauaggacagaauaaucagcaa

SEQ ID NO: 13314 - RNA, 22 nt, Artificial Sequence
  Synthesized RNAi sequence
uauauacugcucauacuuucca

SEQ ID NO: 13315 - RNA, 22 nt, Artificial Sequence
  Synthesized RNAi sequence
uauauaggacagaauaaucagc

SEQ ID NO: 13316 - RNA, 22 nt, Artificial Sequence
  Synthesized RNAi sequence
uauauuuuaauagaaaaguccu

SEQ ID NO: 13317 - RNA, 22 nt, Artificial Sequence
  Synthesized RNAi sequence
uaucaaaccucuuaguaccauu

SEQ ID NO: 13318 - RNA, 22 nt, Artificial Sequence
  Synthesized RNAi sequence
uaucaauuugcacuucagccuc

SEQ ID NO: 13319 - RNA, 22 nt, Artificial Sequence
  Synthesized RNAi sequence
uaucaccaaggcaaucaccaua

SEQ ID NO: 13320 - RNA, 22 nt, Artificial Sequence
  Synthesized RNAi sequence
uaucuaacuccuccuugaauga

SEQ ID NO: 13321 - RNA, 22 nt, Artificial Sequence
  Synthesized RNAi sequence
uaucucucucaaaagguuugag

SEQ ID NO: 13322 - RNA, 22 nt, Artificial Sequence
  Synthesized RNAi sequence
uaugaguuguugacauguucag

SEQ ID NO: 13323 - RNA, 22 nt, Artificial Sequence
  Synthesized RNAi sequence
uauggcaaucaagccagcuaua

SEQ ID NO: 13324 - RNA, 22 nt, Artificial Sequence
  Synthesized RNAi sequence
uaugguugguaaccaacaccau

SEQ ID NO: 13325 - RNA, 22 nt, Artificial Sequence
  Synthesized RNAi sequence
uauguaaagcaaguaaaguuug

SEQ ID NO: 13326 - RNA, 22 nt, Artificial Sequence
  Synthesized RNAi sequence
uaugucacacucauaugaguug

SEQ ID NO: 13327 - RNA, 22 nt, Artificial Sequence
  Synthesized RNAi sequence
uaugucugcaaacuuugaaguc

SEQ ID NO: 13328 - RNA, 22 nt, Artificial Sequence
  Synthesized RNAi sequence
uauguguaauguaauuugacuc

SEQ ID NO: 13329 - RNA, 22 nt, Artificial Sequence
  Synthesized RNAi sequence
uauguuagacuucucaguggaa

SEQ ID NO: 13330 - RNA, 22 nt, Artificial Sequence
  Synthesized RNAi sequence
uauuacaacaucacaguuacca

SEQ ID NO: 13331 - RNA, 22 nt, Artificial Sequence
  Synthesized RNAi sequence
uauuagaguaagcaacugaauu

SEQ ID NO: 13332 - RNA, 22 nt, Artificial Sequence
  Synthesized RNAi sequence
uauuaggaaaucuaacaauaga

SEQ ID NO: 13333 - RNA, 22 nt, Artificial Sequence
  Synthesized RNAi sequence
uauucaaaagugcaauuauucg

SEQ ID NO: 13334 - RNA, 22 nt, Artificial Sequence
  Synthesized RNAi sequence
uauucgcacuagaauaaacucu

SEQ ID NO: 13335 - RNA, 22 nt, Artificial Sequence
  Synthesized RNAi sequence
uauugagcaaucauuucaucug

SEQ ID NO: 13336 - RNA, 22 nt, Artificial Sequence
  Synthesized RNAi sequence
uauuguuugaugaagccagcau

SEQ ID NO: 13337 - RNA, 22 nt, Artificial Sequence
  Synthesized RNAi sequence
uauuuaucuaacuccuccuuga

SEQ ID NO: 13338 - RNA, 22 nt, Artificial Sequence
  Synthesized RNAi sequence
uauuuguaaugcagcaccugca

SEQ ID NO: 13339 - RNA, 22 nt, Artificial Sequence
  Synthesized RNAi sequence
uauuuguuccugguguuauaac

SEQ ID NO: 13340 - RNA, 22 nt, Artificial Sequence
  Synthesized RNAi sequence
ucaaaagaaaguacuacuacuc

SEQ ID NO: 13341 - RNA, 22 nt, Artificial Sequence
  Synthesized RNAi sequence
ucaaaagguuugagauuagacu

SEQ ID NO: 13342 - RNA, 22 nt, Artificial Sequence
  Synthesized RNAi sequence
ucaaaagugcaauuauucgcac

SEQ ID NO: 13343 - RNA, 22 nt, Artificial Sequence
  Synthesized RNAi sequence
ucaaaccucuuaguaccauugg

SEQ ID NO: 13344 - RNA, 22 nt, Artificial Sequence
  Synthesized RNAi sequence
ucaaauaacuucuauguaaagc

SEQ ID NO: 13345 - RNA, 22 nt, Artificial Sequence
  Synthesized RNAi sequence
ucaacaccauuacaaggugugc

SEQ ID NO: 13346 - RNA, 22 nt, Artificial Sequence
  Synthesized RNAi sequence
ucaacaucuggugauguaugau

SEQ ID NO: 13347 - RNA, 22 nt, Artificial Sequence
  Synthesized RNAi sequence
ucaaccuaucaauuugcacuuc

SEQ ID NO: 13348 - RNA, 22 nt, Artificial Sequence
  Synthesized RNAi sequence
ucaacguacacuuuguuucuga

SEQ ID NO: 13349 - RNA, 22 nt, Artificial Sequence
  Synthesized RNAi sequence
ucaacuuugucaagacgugaaa

SEQ ID NO: 13350 - RNA, 22 nt, Artificial Sequence
  Synthesized RNAi sequence
ucaagaaucucaagugucugug

SEQ ID NO: 13351 - RNA, 22 nt, Artificial Sequence
  Synthesized RNAi sequence
ucaagacgugaaaggauaucau

SEQ ID NO: 13352 - RNA, 22 nt, Artificial Sequence
  Synthesized RNAi sequence
ucaagccagcuauaaaaccuag

SEQ ID NO: 13353 - RNA, 22 nt, Artificial Sequence
  Synthesized RNAi sequence
ucaagguccauaagaaaaggcu

SEQ ID NO: 13354 - RNA, 22 nt, Artificial Sequence
  Synthesized RNAi sequence
ucaagugcacagucuacagcau

SEQ ID NO: 13355 - RNA, 22 nt, Artificial Sequence
  Synthesized RNAi sequence
ucaagugucuguggaucacgga

SEQ ID NO: 13356 - RNA, 22 nt, Artificial Sequence
  Synthesized RNAi sequence
ucaauaaaugaccucuugcuug

SEQ ID NO: 13357 - RNA, 22 nt, Artificial Sequence
  Synthesized RNAi sequence
ucaauuugcacuucagccucaa

SEQ ID NO: 13358 - RNA, 22 nt, Artificial Sequence
  Synthesized RNAi sequence
ucacacucauaugaguuguuga

SEQ ID NO: 13359 - RNA, 22 nt, Artificial Sequence
  Synthesized RNAi sequence
ucacagacuuuaauaacaacau

SEQ ID NO: 13360 - RNA, 22 nt, Artificial Sequence
  Synthesized RNAi sequence
ucacaguuaccagacacaaaug

SEQ ID NO: 13361 - RNA, 22 nt, Artificial Sequence
  Synthesized RNAi sequence
ucacauaugucugcaaacuuug

SEQ ID NO: 13362 - RNA, 22 nt, Artificial Sequence
  Synthesized RNAi sequence
ucacaugcaagaagacuacacc

SEQ ID NO: 13363 - RNA, 22 nt, Artificial Sequence
  Synthesized RNAi sequence
ucaccaaggcaaucaccauauu

SEQ ID NO: 13364 - RNA, 22 nt, Artificial Sequence
  Synthesized RNAi sequence
ucaccacaaauguacauuguac

SEQ ID NO: 13365 - RNA, 22 nt, Artificial Sequence
  Synthesized RNAi sequence
ucaccaggagucaaauaacuuc

SEQ ID NO: 13366 - RNA, 22 nt, Artificial Sequence
  Synthesized RNAi sequence
ucaccauauuguuugaugaagc

SEQ ID NO: 13367 - RNA, 22 nt, Artificial Sequence
  Synthesized RNAi sequence
ucaccauuacuauggcaaucaa

SEQ ID NO: 13368 - RNA, 22 nt, Artificial Sequence
  Synthesized RNAi sequence
ucaccuaaaucaacaucuggug

SEQ ID NO: 13369 - RNA, 22 nt, Artificial Sequence
  Synthesized RNAi sequence
ucaccucuaauuacaaaugaau

SEQ ID NO: 13370 - RNA, 22 nt, Artificial Sequence
  Synthesized RNAi sequence
ucacgcacuaaauuaauaggcg

SEQ ID NO: 13371 - RNA, 22 nt, Artificial Sequence
  Synthesized RNAi sequence
ucacggacagcaucaguagugu

SEQ ID NO: 13372 - RNA, 22 nt, Artificial Sequence
  Synthesized RNAi sequence
ucacuuuguugaaaaguagauc

SEQ ID NO: 13373 - RNA, 22 nt, Artificial Sequence
  Synthesized RNAi sequence
ucagcaacacaguugcugauuc

SEQ ID NO: 13374 - RNA, 22 nt, Artificial Sequence
  Synthesized RNAi sequence
ucagcaaucuuuccaguuugcc

SEQ ID NO: 13375 - RNA, 22 nt, Artificial Sequence
  Synthesized RNAi sequence
ucagcaaugucucugccaaauu

SEQ ID NO: 13376 - RNA, 22 nt, Artificial Sequence
  Synthesized RNAi sequence
ucaggguaauaaacaccacgug

SEQ ID NO: 13377 - RNA, 22 nt, Artificial Sequence
  Synthesized RNAi sequence
ucagguugcaaaggaucauaaa

SEQ ID NO: 13378 - RNA, 22 nt, Artificial Sequence
  Synthesized RNAi sequence
ucaguagugucagcaaugucuc

SEQ ID NO: 13379 - RNA, 22 nt, Artificial Sequence
  Synthesized RNAi sequence
ucaguggaagcaaaauaaacac

SEQ ID NO: 13380 - RNA, 22 nt, Artificial Sequence
  Synthesized RNAi sequence
ucaguugaaauaucucucucaa

SEQ ID NO: 13381 - RNA, 22 nt, Artificial Sequence
  Synthesized RNAi sequence
ucaguugaaucaccacaaaugu

SEQ ID NO: 13382 - RNA, 22 nt, Artificial Sequence
  Synthesized RNAi sequence
ucauaaacaaauccauaaguuc

SEQ ID NO: 13383 - RNA, 22 nt, Artificial Sequence
  Synthesized RNAi sequence
ucauaaacuguguuguugacaa

SEQ ID NO: 13384 - RNA, 22 nt, Artificial Sequence
  Synthesized RNAi sequence
ucauacagcaaagcauaauugu

SEQ ID NO: 13385 - RNA, 22 nt, Artificial Sequence
  Synthesized RNAi sequence
ucauacuuuccaaguucuugga

SEQ ID NO: 13386 - RNA, 22 nt, Artificial Sequence
  Synthesized RNAi sequence
ucauagacacugguagaauuuc

SEQ ID NO: 13387 - RNA, 22 nt, Artificial Sequence
  Synthesized RNAi sequence
ucauaugaguuguugacauguu

SEQ ID NO: 13388 - RNA, 22 nt, Artificial Sequence
  Synthesized RNAi sequence
ucaucaccucuaauuacaaaug

SEQ ID NO: 13389 - RNA, 22 nt, Artificial Sequence
  Synthesized RNAi sequence
ucaucugguaauuuauaauuau

SEQ ID NO: 13390 - RNA, 22 nt, Artificial Sequence
  Synthesized RNAi sequence
ucaucugugagcaaagguggca

SEQ ID NO: 13391 - RNA, 22 nt, Artificial Sequence
  Synthesized RNAi sequence
ucaugacaaauggcaggagcag

SEQ ID NO: 13392 - RNA, 22 nt, Artificial Sequence
  Synthesized RNAi sequence
ucauuaaaugguaggacagggu

SEQ ID NO: 13393 - RNA, 22 nt, Artificial Sequence
  Synthesized RNAi sequence
ucauuuaaaacacuugaaauug

SEQ ID NO: 13394 - RNA, 22 nt, Artificial Sequence
  Synthesized RNAi sequence
ucauuuaaauucuuggcaaccu

SEQ ID NO: 13395 - RNA, 22 nt, Artificial Sequence
  Synthesized RNAi sequence
ucauuuaauuuaguaggagaca

SEQ ID NO: 13396 - RNA, 22 nt, Artificial Sequence
  Synthesized RNAi sequence
ucauuucaucugugagcaaagg

SEQ ID NO: 13397 - RNA, 22 nt, Artificial Sequence
  Synthesized RNAi sequence
uccaaccagaagugauuguacc

SEQ ID NO: 13398 - RNA, 22 nt, Artificial Sequence
  Synthesized RNAi sequence
uccaaccugaagaagaaucacc

SEQ ID NO: 13399 - RNA, 22 nt, Artificial Sequence
  Synthesized RNAi sequence
uccaagcauaaacagaugcaaa

SEQ ID NO: 13400 - RNA, 22 nt, Artificial Sequence
  Synthesized RNAi sequence
uccaagugcacuugcuguggaa

SEQ ID NO: 13401 - RNA, 22 nt, Artificial Sequence
  Synthesized RNAi sequence
uccaaguucuuggagaucgaug

SEQ ID NO: 13402 - RNA, 22 nt, Artificial Sequence
  Synthesized RNAi sequence
uccaauaccauuaaaccuauaa

SEQ ID NO: 13403 - RNA, 22 nt, Artificial Sequence
  Synthesized RNAi sequence
uccacaagaacaacagcccuug

SEQ ID NO: 13404 - RNA, 22 nt, Artificial Sequence
  Synthesized RNAi sequence
uccaguuugcccuggagcgauu

SEQ ID NO: 13405 - RNA, 22 nt, Artificial Sequence
  Synthesized RNAi sequence
uccauaacacuuaaaaguggaa

SEQ ID NO: 13406 - RNA, 22 nt, Artificial Sequence
  Synthesized RNAi sequence
uccauaagaaaaggcugagaga

SEQ ID NO: 13407 - RNA, 22 nt, Artificial Sequence
  Synthesized RNAi sequence
uccauaaguucguuuaugugua

SEQ ID NO: 13408 - RNA, 22 nt, Artificial Sequence
  Synthesized RNAi sequence
uccaucaugacaaauggcagga

SEQ ID NO: 13409 - RNA, 22 nt, Artificial Sequence
  Synthesized RNAi sequence
ucccagagacauguauagcaug

SEQ ID NO: 13410 - RNA, 22 nt, Artificial Sequence
  Synthesized RNAi sequence
uccuaaacaaucuauacaggua

SEQ ID NO: 13411 - RNA, 22 nt, Artificial Sequence
  Synthesized RNAi sequence
uccuagguugaagauaacccac

SEQ ID NO: 13412 - RNA, 22 nt, Artificial Sequence
  Synthesized RNAi sequence
uccuauuacaacaucacaguua

SEQ ID NO: 13413 - RNA, 22 nt, Artificial Sequence
  Synthesized RNAi sequence
uccuccuugaaugagucuaauu

SEQ ID NO: 13414 - RNA, 22 nt, Artificial Sequence
  Synthesized RNAi sequence
uccugaguugaauguaaaacug

SEQ ID NO: 13415 - RNA, 22 nt, Artificial Sequence
  Synthesized RNAi sequence
uccugauaaagaacagcaaccu

SEQ ID NO: 13416 - RNA, 22 nt, Artificial Sequence
  Synthesized RNAi sequence
uccugguguuauaacacugaca

SEQ ID NO: 13417 - RNA, 22 nt, Artificial Sequence
  Synthesized RNAi sequence
uccuguuccaagcauaaacaga

SEQ ID NO: 13418 - RNA, 22 nt, Artificial Sequence
  Synthesized RNAi sequence
uccuucaagguccauaagaaaa

SEQ ID NO: 13419 - RNA, 22 nt, Artificial Sequence
  Synthesized RNAi sequence
uccuugaaugagucuaauucag

SEQ ID NO: 13420 - RNA, 22 nt, Artificial Sequence
  Synthesized RNAi sequence
uccuuugagcacuggcucagag

SEQ ID NO: 13421 - RNA, 22 nt, Artificial Sequence
  Synthesized RNAi sequence
ucgaugagagauucauuuaaau

SEQ ID NO: 13422 - RNA, 22 nt, Artificial Sequence
  Synthesized RNAi sequence
ucgcacuagaauaaacucugaa

SEQ ID NO: 13423 - RNA, 22 nt, Artificial Sequence
  Synthesized RNAi sequence
ucgucuucaucaaauuugcagc

SEQ ID NO: 13424 - RNA, 22 nt, Artificial Sequence
  Synthesized RNAi sequence
ucguuuauguguaauguaauuu

SEQ ID NO: 13425 - RNA, 22 nt, Artificial Sequence
  Synthesized RNAi sequence
ucuaacaauagauucuguuggu

SEQ ID NO: 13426 - RNA, 22 nt, Artificial Sequence
  Synthesized RNAi sequence
ucuaacuccuccuugaaugagu

SEQ ID NO: 13427 - RNA, 22 nt, Artificial Sequence
  Synthesized RNAi sequence
ucuaauuaauuguugagucaca

SEQ ID NO: 13428 - RNA, 22 nt, Artificial Sequence
  Synthesized RNAi sequence
ucuaauuacaaaugaaucugca

SEQ ID NO: 13429 - RNA, 22 nt, Artificial Sequence
  Synthesized RNAi sequence
ucuaauucagguugcaaaggau

SEQ ID NO: 13430 - RNA, 22 nt, Artificial Sequence
  Synthesized RNAi sequence
ucuacagcaucuguaaugguuc

SEQ ID NO: 13431 - RNA, 22 nt, Artificial Sequence
  Synthesized RNAi sequence
ucuacugaugucuuggucauag

SEQ ID NO: 13432 - RNA, 22 nt, Artificial Sequence
  Synthesized RNAi sequence
ucuagcagcaauaucaccaagg

SEQ ID NO: 13433 - RNA, 22 nt, Artificial Sequence
  Synthesized RNAi sequence
ucuauacagguaauuauaauua

SEQ ID NO: 13434 - RNA, 22 nt, Artificial Sequence
  Synthesized RNAi sequence
ucuauguaaagcaaguaaaguu

SEQ ID NO: 13435 - RNA, 22 nt, Artificial Sequence
  Synthesized RNAi sequence
ucucaaaagguuugagauuaga

SEQ ID NO: 13436 - RNA, 22 nt, Artificial Sequence
  Synthesized RNAi sequence
ucucaagugucuguggaucacg

SEQ ID NO: 13437 - RNA, 22 nt, Artificial Sequence
  Synthesized RNAi sequence
ucucaguggaagcaaaauaaac

SEQ ID NO: 13438 - RNA, 22 nt, Artificial Sequence
  Synthesized RNAi sequence
ucucuagcagcaauaucaccaa

SEQ ID NO: 13439 - RNA, 22 nt, Artificial Sequence
  Synthesized RNAi sequence
ucucucaaaagguuugagauua

SEQ ID NO: 13440 - RNA, 22 nt, Artificial Sequence
  Synthesized RNAi sequence
ucucucucaaaagguuugagau

SEQ ID NO: 13441 - RNA, 22 nt, Artificial Sequence
  Synthesized RNAi sequence
ucugaaaacuuugucaggguaa

SEQ ID NO: 13442 - RNA, 22 nt, Artificial Sequence
  Synthesized RNAi sequence
ucugacauuuuaguagcagcaa

SEQ ID NO: 13443 - RNA, 22 nt, Artificial Sequence
  Synthesized RNAi sequence
ucugacuucaucaccucuaauu

SEQ ID NO: 13444 - RNA, 22 nt, Artificial Sequence
  Synthesized RNAi sequence
ucugagagagggucaagugcac

SEQ ID NO: 13445 - RNA, 22 nt, Artificial Sequence
  Synthesized RNAi sequence
ucugagucugauaacuagcgca

SEQ ID NO: 13446 - RNA, 22 nt, Artificial Sequence
  Synthesized RNAi sequence
ucugauaacuagcgcauauacc

SEQ ID NO: 13447 - RNA, 22 nt, Artificial Sequence
  Synthesized RNAi sequence
ucugauuucugcagcucuaauu

SEQ ID NO: 13448 - RNA, 22 nt, Artificial Sequence
  Synthesized RNAi sequence
ucugcaaacuuugaagucugcc

SEQ ID NO: 13449 - RNA, 22 nt, Artificial Sequence
  Synthesized RNAi sequence
ucugcaagugucacuuuguuga

SEQ ID NO: 13450 - RNA, 22 nt, Artificial Sequence
  Synthesized RNAi sequence
ucugcaccaagugacauagugu

SEQ ID NO: 13451 - RNA, 22 nt, Artificial Sequence
  Synthesized RNAi sequence
ucugcagcucuaauuaauuguu

SEQ ID NO: 13452 - RNA, 22 nt, Artificial Sequence
  Synthesized RNAi sequence
ucugcauagacauuaguaaagc

SEQ ID NO: 13453 - RNA, 22 nt, Artificial Sequence
  Synthesized RNAi sequence
ucugcaugaauagcaacaggga

SEQ ID NO: 13454 - RNA, 22 nt, Artificial Sequence
  Synthesized RNAi sequence
ucugccugugaucaaccuauca

SEQ ID NO: 13455 - RNA, 22 nt, Artificial Sequence
  Synthesized RNAi sequence
ucuggugauguaugauucuuaa

SEQ ID NO: 13456 - RNA, 22 nt, Artificial Sequence
  Synthesized RNAi sequence
ucuguaaugguuccauuuucau

SEQ ID NO: 13457 - RNA, 22 nt, Artificial Sequence
  Synthesized RNAi sequence
ucuguaugguugguaaccaaca

SEQ ID NO: 13458 - RNA, 22 nt, Artificial Sequence
  Synthesized RNAi sequence
ucugugagcaaagguggcaaaa

SEQ ID NO: 13459 - RNA, 22 nt, Artificial Sequence
  Synthesized RNAi sequence
ucugugcaguuaacauccugau

SEQ ID NO: 13460 - RNA, 22 nt, Artificial Sequence
  Synthesized RNAi sequence
ucuguggaucacggacagcauc

SEQ ID NO: 13461 - RNA, 22 nt, Artificial Sequence
  Synthesized RNAi sequence
ucugugguaacacuaauaguaa

SEQ ID NO: 13462 - RNA, 22 nt, Artificial Sequence
  Synthesized RNAi sequence
ucuguguaacuccaauaccauu

SEQ ID NO: 13463 - RNA, 22 nt, Artificial Sequence
  Synthesized RNAi sequence
ucuguugguuggacucuaaagu

SEQ ID NO: 13464 - RNA, 22 nt, Artificial Sequence
  Synthesized RNAi sequence
ucuuaguaccauuggucccaga

SEQ ID NO: 13465 - RNA, 22 nt, Artificial Sequence
  Synthesized RNAi sequence
ucuucaauaaaugaccucuugc

SEQ ID NO: 13466 - RNA, 22 nt, Artificial Sequence
  Synthesized RNAi sequence
ucuucaucaaauuugcagcagg

SEQ ID NO: 13467 - RNA, 22 nt, Artificial Sequence
  Synthesized RNAi sequence
ucuugaaguuuuccaagugcac

SEQ ID NO: 13468 - RNA, 22 nt, Artificial Sequence
  Synthesized RNAi sequence
ucuugaauuuugccaauagcac

SEQ ID NO: 13469 - RNA, 22 nt, Artificial Sequence
  Synthesized RNAi sequence
ucuugcuugguuuugauggauc

SEQ ID NO: 13470 - RNA, 22 nt, Artificial Sequence
  Synthesized RNAi sequence
ucuuggagaucgaugagagauu

SEQ ID NO: 13471 - RNA, 22 nt, Artificial Sequence
  Synthesized RNAi sequence
ucuuggucauagacacugguag

SEQ ID NO: 13472 - RNA, 22 nt, Artificial Sequence
  Synthesized RNAi sequence
ucuugugcagggacauaaguca

SEQ ID NO: 13473 - RNA, 22 nt, Artificial Sequence
  Synthesized RNAi sequence
ucuuuaauuggugguguuuugu

SEQ ID NO: 13474 - RNA, 22 nt, Artificial Sequence
  Synthesized RNAi sequence
ucuuuccaguuugcccuggagc

SEQ ID NO: 13475 - RNA, 22 nt, Artificial Sequence
  Synthesized RNAi sequence
ucuuuucuugugcagggacaua

SEQ ID NO: 13476 - RNA, 22 nt, Artificial Sequence
  Synthesized RNAi sequence
ugaaaacuuugucaggguaaua

SEQ ID NO: 13477 - RNA, 22 nt, Artificial Sequence
  Synthesized RNAi sequence
ugaaacaaagacaccuucacga

SEQ ID NO: 13478 - RNA, 22 nt, Artificial Sequence
  Synthesized RNAi sequence
ugaaaccuagugauguuaauac

SEQ ID NO: 13479 - RNA, 22 nt, Artificial Sequence
  Synthesized RNAi sequence
ugaaaggauaucauuuaaaaca

SEQ ID NO: 13480 - RNA, 22 nt, Artificial Sequence
  Synthesized RNAi sequence
ugaaauaucucucucaaaaggu

SEQ ID NO: 13481 - RNA, 22 nt, Artificial Sequence
  Synthesized RNAi sequence
ugaaauucacagacuuuaauaa

SEQ ID NO: 13482 - RNA, 22 nt, Artificial Sequence
  Synthesized RNAi sequence
ugaaauugcaccaaaauuggag

SEQ ID NO: 13483 - RNA, 22 nt, Artificial Sequence
  Synthesized RNAi sequence
ugaagaagaaucaccaggaguc

SEQ ID NO: 13484 - RNA, 22 nt, Artificial Sequence
  Synthesized RNAi sequence
ugaagauaacccacauaauaag

SEQ ID NO: 13485 - RNA, 22 nt, Artificial Sequence
  Synthesized RNAi sequence
ugaagcauuaaugccagagaug

SEQ ID NO: 13486 - RNA, 22 nt, Artificial Sequence
  Synthesized RNAi sequence
ugaagucugccugugaucaacc

SEQ ID NO: 13487 - RNA, 22 nt, Artificial Sequence
  Synthesized RNAi sequence
ugaaguucuuuucuugugcagg

SEQ ID NO: 13488 - RNA, 22 nt, Artificial Sequence
  Synthesized RNAi sequence
ugaaguuuuccaagugcacuug

SEQ ID NO: 13489 - RNA, 22 nt, Artificial Sequence
  Synthesized RNAi sequence
ugaauagcaacagggacuucug

SEQ ID NO: 13490 - RNA, 22 nt, Artificial Sequence
  Synthesized RNAi sequence
ugaaucaccacaaauguacauu

SEQ ID NO: 13491 - RNA, 22 nt, Artificial Sequence
  Synthesized RNAi sequence
ugaaucugcauagacauuagua

SEQ ID NO: 13492 - RNA, 22 nt, Artificial Sequence
  Synthesized RNAi sequence
ugaaugagucuaauucagguug

SEQ ID NO: 13493 - RNA, 22 nt, Artificial Sequence
  Synthesized RNAi sequence
ugaauguaaaacugaggaucug

SEQ ID NO: 13494 - RNA, 22 nt, Artificial Sequence
  Synthesized RNAi sequence
ugaauuuucugcaccaagugac

SEQ ID NO: 13495 - RNA, 22 nt, Artificial Sequence
  Synthesized RNAi sequence
ugaauuuugccaauagcacuau

SEQ ID NO: 13496 - RNA, 22 nt, Artificial Sequence
  Synthesized RNAi sequence
ugacaaauggcaggagcaguug

SEQ ID NO: 13497 - RNA, 22 nt, Artificial Sequence
  Synthesized RNAi sequence
ugacaauuccuauuacaacauc

SEQ ID NO: 13498 - RNA, 22 nt, Artificial Sequence
  Synthesized RNAi sequence
ugacaccaccaaaagaacaugg

SEQ ID NO: 13499 - RNA, 22 nt, Artificial Sequence
  Synthesized RNAi sequence
ugacauaguguaggcaaugaug

SEQ ID NO: 13500 - RNA, 22 nt, Artificial Sequence
  Synthesized RNAi sequence
ugacauguucagccccuauuaa

SEQ ID NO: 13501 - RNA, 22 nt, Artificial Sequence
  Synthesized RNAi sequence
ugacauuuuaguagcagcaaga

SEQ ID NO: 13502 - RNA, 22 nt, Artificial Sequence
  Synthesized RNAi sequence
ugaccacaucuugaaguuuucc

SEQ ID NO: 13503 - RNA, 22 nt, Artificial Sequence
  Synthesized RNAi sequence
ugaccucuugcuugguuuugau

SEQ ID NO: 13504 - RNA, 22 nt, Artificial Sequence
  Synthesized RNAi sequence
ugacuagcuacacuacgugccc

SEQ ID NO: 13505 - RNA, 22 nt, Artificial Sequence
  Synthesized RNAi sequence
ugacuccuuugagcacuggcuc

SEQ ID NO: 13506 - RNA, 22 nt, Artificial Sequence
  Synthesized RNAi sequence
ugacugagggaaggacauaaga

SEQ ID NO: 13507 - RNA, 22 nt, Artificial Sequence
  Synthesized RNAi sequence
ugacuucaucaccucuaauuac

SEQ ID NO: 13508 - RNA, 22 nt, Artificial Sequence
  Synthesized RNAi sequence
ugagacaacuacagcaacuggu

SEQ ID NO: 13509 - RNA, 22 nt, Artificial Sequence
  Synthesized RNAi sequence
ugagagacauauucaaaagugc

SEQ ID NO: 13510 - RNA, 22 nt, Artificial Sequence
  Synthesized RNAi sequence
ugagagagggucaagugcacag

SEQ ID NO: 13511 - RNA, 22 nt, Artificial Sequence
  Synthesized RNAi sequence
ugagagauucauuuaaauucuu

SEQ ID NO: 13512 - RNA, 22 nt, Artificial Sequence
  Synthesized RNAi sequence
ugagauuagacuuccuaaacaa

SEQ ID NO: 13513 - RNA, 22 nt, Artificial Sequence
  Synthesized RNAi sequence
ugagcaaagguggcaaaacagu

SEQ ID NO: 13514 - RNA, 22 nt, Artificial Sequence
  Synthesized RNAi sequence
ugagcaaucauuucaucuguga

SEQ ID NO: 13515 - RNA, 22 nt, Artificial Sequence
  Synthesized RNAi sequence
ugagcacuggcucagagucguc

SEQ ID NO: 13516 - RNA, 22 nt, Artificial Sequence
  Synthesized RNAi sequence
ugaggaucugaaaacuuuguca

SEQ ID NO: 13517 - RNA, 22 nt, Artificial Sequence
  Synthesized RNAi sequence
ugagggaaggacauaagaugau

SEQ ID NO: 13518 - RNA, 22 nt, Artificial Sequence
  Synthesized RNAi sequence
ugaggucucuagcagcaauauc

SEQ ID NO: 13519 - RNA, 22 nt, Artificial Sequence
  Synthesized RNAi sequence
ugaggugcugacugagggaagg

SEQ ID NO: 13520 - RNA, 22 nt, Artificial Sequence
  Synthesized RNAi sequence
ugagucacauaugucugcaaac

SEQ ID NO: 13521 - RNA, 22 nt, Artificial Sequence
  Synthesized RNAi sequence
ugagucuaauucagguugcaaa

SEQ ID NO: 13522 - RNA, 22 nt, Artificial Sequence
  Synthesized RNAi sequence
ugagucugauaacuagcgcaua

SEQ ID NO: 13523 - RNA, 22 nt, Artificial Sequence
  Synthesized RNAi sequence
ugagucuugaauuuugccaaua

SEQ ID NO: 13524 - RNA, 22 nt, Artificial Sequence
  Synthesized RNAi sequence
ugaguugaauguaaaacugagg

SEQ ID NO: 13525 - RNA, 22 nt, Artificial Sequence
  Synthesized RNAi sequence
ugaguuguugacauguucagcc

SEQ ID NO: 13526 - RNA, 22 nt, Artificial Sequence
  Synthesized RNAi sequence
ugauaaagaacagcaaccuggu

SEQ ID NO: 13527 - RNA, 22 nt, Artificial Sequence
  Synthesized RNAi sequence
ugauaacuagcgcauauaccug

SEQ ID NO: 13528 - RNA, 22 nt, Artificial Sequence
  Synthesized RNAi sequence
ugauagauuucaguugaaauau

SEQ ID NO: 13529 - RNA, 22 nt, Artificial Sequence
  Synthesized RNAi sequence
ugaucaaccuaucaauuugcac

SEQ ID NO: 13530 - RNA, 22 nt, Artificial Sequence
  Synthesized RNAi sequence
ugaugaagccagcaucugcaag

SEQ ID NO: 13531 - RNA, 22 nt, Artificial Sequence
  Synthesized RNAi sequence
ugaugcggaauuauauaggaca

SEQ ID NO: 13532 - RNA, 22 nt, Artificial Sequence
  Synthesized RNAi sequence
ugauggauugacuagcuacacu

SEQ ID NO: 13533 - RNA, 22 nt, Artificial Sequence
  Synthesized RNAi sequence
ugauguaugauucuuaaaauau

SEQ ID NO: 13534 - RNA, 22 nt, Artificial Sequence
  Synthesized RNAi sequence
ugaugucuuggucauagacacu

SEQ ID NO: 13535 - RNA, 22 nt, Artificial Sequence
  Synthesized RNAi sequence
ugauguuaauaccuauuggcaa

SEQ ID NO: 13536 - RNA, 22 nt, Artificial Sequence
  Synthesized RNAi sequence
ugauucucuuccuguuccaagc

SEQ ID NO: 13537 - RNA, 22 nt, Artificial Sequence
  Synthesized RNAi sequence
ugauuguaaaggaaaguaacaa

SEQ ID NO: 13538 - RNA, 22 nt, Artificial Sequence
  Synthesized RNAi sequence
ugauuguacccgcuaacagugc

SEQ ID NO: 13539 - RNA, 22 nt, Artificial Sequence
  Synthesized RNAi sequence
ugauuucugcagcucuaauuaa

SEQ ID NO: 13540 - RNA, 22 nt, Artificial Sequence
  Synthesized RNAi sequence
ugcaaacuuugaagucugccug

SEQ ID NO: 13541 - RNA, 22 nt, Artificial Sequence
  Synthesized RNAi sequence
ugcaaaggaucauaaacugugu

SEQ ID NO: 13542 - RNA, 22 nt, Artificial Sequence
  Synthesized RNAi sequence
ugcaagaagacuacaccaugag

SEQ ID NO: 13543 - RNA, 22 nt, Artificial Sequence
  Synthesized RNAi sequence
ugcaagugucacuuuguugaaa

SEQ ID NO: 13544 - RNA, 22 nt, Artificial Sequence
  Synthesized RNAi sequence
ugcaauuauucgcacuagaaua

SEQ ID NO: 13545 - RNA, 22 nt, Artificial Sequence
  Synthesized RNAi sequence
ugcacaaaugaggucucuagca

SEQ ID NO: 13546 - RNA, 22 nt, Artificial Sequence
  Synthesized RNAi sequence
ugcacagucuacagcaucugua

SEQ ID NO: 13547 - RNA, 22 nt, Artificial Sequence
  Synthesized RNAi sequence
ugcaccaaaauuggagcuaagu

SEQ ID NO: 13548 - RNA, 22 nt, Artificial Sequence
  Synthesized RNAi sequence
ugcaccaaagguccaaccagaa

SEQ ID NO: 13549 - RNA, 22 nt, Artificial Sequence
  Synthesized RNAi sequence
ugcaccaagugacauaguguag

SEQ ID NO: 13550 - RNA, 22 nt, Artificial Sequence
  Synthesized RNAi sequence
ugcaccaauggguaugucacac

SEQ ID NO: 13551 - RNA, 22 nt, Artificial Sequence
  Synthesized RNAi sequence
ugcacuucagccucaacuuugu

SEQ ID NO: 13552 - RNA, 22 nt, Artificial Sequence
  Synthesized RNAi sequence
ugcacuugcuguggaagaaagu

SEQ ID NO: 13553 - RNA, 22 nt, Artificial Sequence
  Synthesized RNAi sequence
ugcagaaguguauugagcaauc

SEQ ID NO: 13554 - RNA, 22 nt, Artificial Sequence
  Synthesized RNAi sequence
ugcagcaccugcaccaaagguc

SEQ ID NO: 13555 - RNA, 22 nt, Artificial Sequence
  Synthesized RNAi sequence
ugcagcucuaauuaauuguuga

SEQ ID NO: 13556 - RNA, 22 nt, Artificial Sequence
  Synthesized RNAi sequence
ugcagggacauaagucacaugc

SEQ ID NO: 13557 - RNA, 22 nt, Artificial Sequence
  Synthesized RNAi sequence
ugcaguuaacauccugauaaag

SEQ ID NO: 13558 - RNA, 22 nt, Artificial Sequence
  Synthesized RNAi sequence
ugcauagacauuaguaaagcag

SEQ ID NO: 13559 - RNA, 22 nt, Artificial Sequence
  Synthesized RNAi sequence
ugcauagcaaaugguauuugua

SEQ ID NO: 13560 - RNA, 22 nt, Artificial Sequence
  Synthesized RNAi sequence
ugcaugaauagcaacagggacu

SEQ ID NO: 13561 - RNA, 22 nt, Artificial Sequence
  Synthesized RNAi sequence
ugcauguagaaguucaaaagaa

SEQ ID NO: 13562 - RNA, 22 nt, Artificial Sequence
  Synthesized RNAi sequence
ugcauucaguugaaucaccaca

SEQ ID NO: 13563 - RNA, 22 nt, Artificial Sequence
  Synthesized RNAi sequence
ugcauuuugguugaccacaucu

SEQ ID NO: 13564 - RNA, 22 nt, Artificial Sequence
  Synthesized RNAi sequence
ugccaauagcacuauuaaauug

SEQ ID NO: 13565 - RNA, 22 nt, Artificial Sequence
  Synthesized RNAi sequence
ugccagagaugucaccuaaauc

SEQ ID NO: 13566 - RNA, 22 nt, Artificial Sequence
  Synthesized RNAi sequence
ugccauuugaaacaaagacacc

SEQ ID NO: 13567 - RNA, 22 nt, Artificial Sequence
  Synthesized RNAi sequence
ugcccgccgaggagaauuaguc

SEQ ID NO: 13568 - RNA, 22 nt, Artificial Sequence
  Synthesized RNAi sequence
ugcccuggagcgauuugucuga

SEQ ID NO: 13569 - RNA, 22 nt, Artificial Sequence
  Synthesized RNAi sequence
ugccuguuaaaccauugaaguu

SEQ ID NO: 13570 - RNA, 22 nt, Artificial Sequence
  Synthesized RNAi sequence
ugcggaauuauauaggacagaa

SEQ ID NO: 13571 - RNA, 22 nt, Artificial Sequence
  Synthesized RNAi sequence
ugcuaccggccugauagauuuc

SEQ ID NO: 13572 - RNA, 22 nt, Artificial Sequence
  Synthesized RNAi sequence
ugcucauacuuuccaaguucuu

SEQ ID NO: 13573 - RNA, 22 nt, Artificial Sequence
  Synthesized RNAi sequence
ugcugacugagggaaggacaua

SEQ ID NO: 13574 - RNA, 22 nt, Artificial Sequence
  Synthesized RNAi sequence
ugcugauucucuuccuguucca

SEQ ID NO: 13575 - RNA, 22 nt, Artificial Sequence
  Synthesized RNAi sequence
ugcugcauucaguugaaucacc

SEQ ID NO: 13576 - RNA, 22 nt, Artificial Sequence
  Synthesized RNAi sequence
ugcuggugcauguagaaguuca

SEQ ID NO: 13577 - RNA, 22 nt, Artificial Sequence
  Synthesized RNAi sequence
ugcuugguuuugauggaucugg

SEQ ID NO: 13578 - RNA, 22 nt, Artificial Sequence
  Synthesized RNAi sequence
ugcuuuuccaucaugacaaaug

SEQ ID NO: 13579 - RNA, 22 nt, Artificial Sequence
  Synthesized RNAi sequence
uggaaaagaaagguaagaacaa

SEQ ID NO: 13580 - RNA, 22 nt, Artificial Sequence
  Synthesized RNAi sequence
uggaaaaugaugcggaauuaua

SEQ ID NO: 13581 - RNA, 22 nt, Artificial Sequence
  Synthesized RNAi sequence
uggaaccaaguaacauuggaaa

SEQ ID NO: 13582 - RNA, 22 nt, Artificial Sequence
  Synthesized RNAi sequence
uggaagaaagugagucuugaau

SEQ ID NO: 13583 - RNA, 22 nt, Artificial Sequence
  Synthesized RNAi sequence
uggaagcaaaauaaacaccauc

SEQ ID NO: 13584 - RNA, 22 nt, Artificial Sequence
  Synthesized RNAi sequence
uggacucuaaaguuagaaguuu

SEQ ID NO: 13585 - RNA, 22 nt, Artificial Sequence
  Synthesized RNAi sequence
uggagaucgaugagagauucau

SEQ ID NO: 13586 - RNA, 22 nt, Artificial Sequence
  Synthesized RNAi sequence
uggagcgauuugucugacuuca

SEQ ID NO: 13587 - RNA, 22 nt, Artificial Sequence
  Synthesized RNAi sequence
uggagcuaaguuguuuaacaag

SEQ ID NO: 13588 - RNA, 22 nt, Artificial Sequence
  Synthesized RNAi sequence
uggaucacggacagcaucagua

SEQ ID NO: 13589 - RNA, 22 nt, Artificial Sequence
  Synthesized RNAi sequence
uggauugacuagcuacacuacg

SEQ ID NO: 13590 - RNA, 22 nt, Artificial Sequence
  Synthesized RNAi sequence
uggcaaaacaguaaggccguua

SEQ ID NO: 13591 - RNA, 22 nt, Artificial Sequence
  Synthesized RNAi sequence
uggcaauagaguuauuagagua

SEQ ID NO: 13592 - RNA, 22 nt, Artificial Sequence
  Synthesized RNAi sequence
uggcaaucaagccagcuauaaa

SEQ ID NO: 13593 - RNA, 22 nt, Artificial Sequence
  Synthesized RNAi sequence
uggcaggagcaguugugaaguu

SEQ ID NO: 13594 - RNA, 22 nt, Artificial Sequence
  Synthesized RNAi sequence
uggccauuuuauauacugcuca

SEQ ID NO: 13595 - RNA, 22 nt, Artificial Sequence
  Synthesized RNAi sequence
uggcucagagucgucuucauca

SEQ ID NO: 13596 - RNA, 22 nt, Artificial Sequence
  Synthesized RNAi sequence
uggguauggcaauagaguuauu

SEQ ID NO: 13597 - RNA, 22 nt, Artificial Sequence
  Synthesized RNAi sequence
uggguaugucacacucauauga

SEQ ID NO: 13598 - RNA, 22 nt, Artificial Sequence
  Synthesized RNAi sequence
uggguuggaaaccauaugauug

SEQ ID NO: 13599 - RNA, 22 nt, Artificial Sequence
  Synthesized RNAi sequence
ugguaacacuaauaguaaaauu

SEQ ID NO: 13600 - RNA, 22 nt, Artificial Sequence
  Synthesized RNAi sequence
ugguaaccaacaccauuagugg

SEQ ID NO: 13601 - RNA, 22 nt, Artificial Sequence
  Synthesized RNAi sequence
ugguagaauuucugugguaaca

SEQ ID NO: 13602 - RNA, 22 nt, Artificial Sequence
  Synthesized RNAi sequence
ugguaggacaggguuaucaaac

SEQ ID NO: 13603 - RNA, 22 nt, Artificial Sequence
  Synthesized RNAi sequence
ugguauuuguaaugcagcaccu

SEQ ID NO: 13604 - RNA, 22 nt, Artificial Sequence
  Synthesized RNAi sequence
uggucauacagcaaagcauaau

SEQ ID NO: 13605 - RNA, 22 nt, Artificial Sequence
  Synthesized RNAi sequence
uggucauagacacugguagaau

SEQ ID NO: 13606 - RNA, 22 nt, Artificial Sequence
  Synthesized RNAi sequence
uggucccagagacauguauagc

SEQ ID NO: 13607 - RNA, 22 nt, Artificial Sequence
  Synthesized RNAi sequence
uggugauguaugauucuuaaaa

SEQ ID NO: 13608 - RNA, 22 nt, Artificial Sequence
  Synthesized RNAi sequence
uggugcauguagaaguucaaaa

SEQ ID NO: 13609 - RNA, 22 nt, Artificial Sequence
  Synthesized RNAi sequence
uggugguguuuuguaaauuugu

SEQ ID NO: 13610 - RNA, 22 nt, Artificial Sequence
  Synthesized RNAi sequence
ugguguaaugucaagaaucuca

SEQ ID NO: 13611 - RNA, 22 nt, Artificial Sequence
  Synthesized RNAi sequence
ugguguuauaacacugacacca

SEQ ID NO: 13612 - RNA, 22 nt, Artificial Sequence
  Synthesized RNAi sequence
ugguuagaaguauuuguuccug

SEQ ID NO: 13613 - RNA, 22 nt, Artificial Sequence
  Synthesized RNAi sequence
ugguuggacucuaaaguuagaa

SEQ ID NO: 13614 - RNA, 22 nt, Artificial Sequence
  Synthesized RNAi sequence
ugguugguaaccaacaccauua

SEQ ID NO: 13615 - RNA, 22 nt, Artificial Sequence
  Synthesized RNAi sequence
uguaaagcaaguaaaguuugaa

SEQ ID NO: 13616 - RNA, 22 nt, Artificial Sequence
  Synthesized RNAi sequence
uguaaaggaaaguaacaauuaa

SEQ ID NO: 13617 - RNA, 22 nt, Artificial Sequence
  Synthesized RNAi sequence
uguaacuccaauaccauuaaac

SEQ ID NO: 13618 - RNA, 22 nt, Artificial Sequence
  Synthesized RNAi sequence
uguaagauuaacacacugacua

SEQ ID NO: 13619 - RNA, 22 nt, Artificial Sequence
  Synthesized RNAi sequence
uguaauauuaggaaaucuaaca

SEQ ID NO: 13620 - RNA, 22 nt, Artificial Sequence
  Synthesized RNAi sequence
uguaaugcagcaccugcaccaa

SEQ ID NO: 13621 - RNA, 22 nt, Artificial Sequence
  Synthesized RNAi sequence
uguaaugguuccauuuucauua

SEQ ID NO: 13622 - RNA, 22 nt, Artificial Sequence
  Synthesized RNAi sequence
uguaauguaauuugacuccuuu

SEQ ID NO: 13623 - RNA, 22 nt, Artificial Sequence
  Synthesized RNAi sequence
uguaaugucaagaaucucaagu

SEQ ID NO: 13624 - RNA, 22 nt, Artificial Sequence
  Synthesized RNAi sequence
uguaauuugacuccuuugagca

SEQ ID NO: 13625 - RNA, 22 nt, Artificial Sequence
  Synthesized RNAi sequence
uguacaaucuacugaugucuug

SEQ ID NO: 13626 - RNA, 22 nt, Artificial Sequence
  Synthesized RNAi sequence
uguacauuguacaaucuacuga

SEQ ID NO: 13627 - RNA, 22 nt, Artificial Sequence
  Synthesized RNAi sequence
uguaccauggccauuuuauaua

SEQ ID NO: 13628 - RNA, 22 nt, Artificial Sequence
  Synthesized RNAi sequence
uguacccgcuaacagugcagaa

SEQ ID NO: 13629 - RNA, 22 nt, Artificial Sequence
  Synthesized RNAi sequence
uguagaauaaacacgccaagua

SEQ ID NO: 13630 - RNA, 22 nt, Artificial Sequence
  Synthesized RNAi sequence
uguaggcaaugauggauugacu

SEQ ID NO: 13631 - RNA, 22 nt, Artificial Sequence
  Synthesized RNAi sequence
uguauagcauggaaccaaguaa

SEQ ID NO: 13632 - RNA, 22 nt, Artificial Sequence
  Synthesized RNAi sequence
uguaugguugguaaccaacacc

SEQ ID NO: 13633 - RNA, 22 nt, Artificial Sequence
  Synthesized RNAi sequence
uguauugagcaaucauuucauc

SEQ ID NO: 13634 - RNA, 22 nt, Artificial Sequence
  Synthesized RNAi sequence
ugucaagaaucucaagugucug

SEQ ID NO: 13635 - RNA, 22 nt, Artificial Sequence
  Synthesized RNAi sequence
ugucaagacgugaaaggauauc

SEQ ID NO: 13636 - RNA, 22 nt, Artificial Sequence
  Synthesized RNAi sequence
ugucacacucauaugaguuguu

SEQ ID NO: 13637 - RNA, 22 nt, Artificial Sequence
  Synthesized RNAi sequence
ugucaccauuacuauggcaauc

SEQ ID NO: 13638 - RNA, 22 nt, Artificial Sequence
  Synthesized RNAi sequence
ugucaccuaaaucaacaucugg

SEQ ID NO: 13639 - RNA, 22 nt, Artificial Sequence
  Synthesized RNAi sequence
ugucacuuuguugaaaaguaga

SEQ ID NO: 13640 - RNA, 22 nt, Artificial Sequence
  Synthesized RNAi sequence
ugucagcaaugucucugccaaa

SEQ ID NO: 13641 - RNA, 22 nt, Artificial Sequence
  Synthesized RNAi sequence
ugucaggguaauaaacaccacg

SEQ ID NO: 13642 - RNA, 22 nt, Artificial Sequence
  Synthesized RNAi sequence
uguccaaccugaagaagaauca

SEQ ID NO: 13643 - RNA, 22 nt, Artificial Sequence
  Synthesized RNAi sequence
ugucucugccaaauuguuggaa

SEQ ID NO: 13644 - RNA, 22 nt, Artificial Sequence
  Synthesized RNAi sequence
ugucugacuucaucaccucuaa

SEQ ID NO: 13645 - RNA, 22 nt, Artificial Sequence
  Synthesized RNAi sequence
ugucugcaaacuuugaagucug

SEQ ID NO: 13646 - RNA, 22 nt, Artificial Sequence
  Synthesized RNAi sequence
ugucuguggaucacggacagca

SEQ ID NO: 13647 - RNA, 22 nt, Artificial Sequence
  Synthesized RNAi sequence
ugucuuggucauagacacuggu

SEQ ID NO: 13648 - RNA, 22 nt, Artificial Sequence
  Synthesized RNAi sequence
ugugaaguucuuuucuugugca

SEQ ID NO: 13649 - RNA, 22 nt, Artificial Sequence
  Synthesized RNAi sequence
ugugagcaaagguggcaaaaca

SEQ ID NO: 13650 - RNA, 22 nt, Artificial Sequence
  Synthesized RNAi sequence
ugugaucaaccuaucaauuugc

SEQ ID NO: 13651 - RNA, 22 nt, Artificial Sequence
  Synthesized RNAi sequence
ugugcacaaaugaggucucuag

SEQ ID NO: 13652 - RNA, 22 nt, Artificial Sequence
  Synthesized RNAi sequence
ugugcagggacauaagucacau

SEQ ID NO: 13653 - RNA, 22 nt, Artificial Sequence
  Synthesized RNAi sequence
ugugcauuuugguugaccacau

SEQ ID NO: 13654 - RNA, 22 nt, Artificial Sequence
  Synthesized RNAi sequence
ugugccauuugaaacaaagaca

SEQ ID NO: 13655 - RNA, 22 nt, Artificial Sequence
  Synthesized RNAi sequence
ugugccuguuaaaccauugaag

SEQ ID NO: 13656 - RNA, 22 nt, Artificial Sequence
  Synthesized RNAi sequence
ugugcuaccggccugauagauu

SEQ ID NO: 13657 - RNA, 22 nt, Artificial Sequence
  Synthesized RNAi sequence
uguggaagaaagugagucuuga

SEQ ID NO: 13658 - RNA, 22 nt, Artificial Sequence
  Synthesized RNAi sequence
uguggaucacggacagcaucag

SEQ ID NO: 13659 - RNA, 22 nt, Artificial Sequence
  Synthesized RNAi sequence
uguggguauggcaauagaguua

SEQ ID NO: 13660 - RNA, 22 nt, Artificial Sequence
  Synthesized RNAi sequence
ugugguaacacuaauaguaaaa

SEQ ID NO: 13661 - RNA, 22 nt, Artificial Sequence
  Synthesized RNAi sequence
uguguaacuccaauaccauuaa

SEQ ID NO: 13662 - RNA, 22 nt, Artificial Sequence
  Synthesized RNAi sequence
uguguaauguaauuugacuccu

SEQ ID NO: 13663 - RNA, 22 nt, Artificial Sequence
  Synthesized RNAi sequence
ugugugccauuugaaacaaaga

SEQ ID NO: 13664 - RNA, 22 nt, Artificial Sequence
  Synthesized RNAi sequence
uguguuguugacaauuccuauu

SEQ ID NO: 13665 - RNA, 22 nt, Artificial Sequence
  Synthesized RNAi sequence
uguuaaaccauugaaguugaaa

SEQ ID NO: 13666 - RNA, 22 nt, Artificial Sequence
  Synthesized RNAi sequence
uguuaauaccuauuggcaaauc

SEQ ID NO: 13667 - RNA, 22 nt, Artificial Sequence
  Synthesized RNAi sequence
uguuagacuucucaguggaagc

SEQ ID NO: 13668 - RNA, 22 nt, Artificial Sequence
  Synthesized RNAi sequence
uguuauaacacugacaccacca

SEQ ID NO: 13669 - RNA, 22 nt, Artificial Sequence
  Synthesized RNAi sequence
uguucagccccuauuaaacagc

SEQ ID NO: 13670 - RNA, 22 nt, Artificial Sequence
  Synthesized RNAi sequence
uguuccaagcauaaacagaugc

SEQ ID NO: 13671 - RNA, 22 nt, Artificial Sequence
  Synthesized RNAi sequence
uguuccugguguuauaacacug

SEQ ID NO: 13672 - RNA, 22 nt, Artificial Sequence
  Synthesized RNAi sequence
uguugacaauuccuauuacaac

SEQ ID NO: 13673 - RNA, 22 nt, Artificial Sequence
  Synthesized RNAi sequence
uguugacauguucagccccuau

SEQ ID NO: 13674 - RNA, 22 nt, Artificial Sequence
  Synthesized RNAi sequence
uguugagucacauaugucugca

SEQ ID NO: 13675 - RNA, 22 nt, Artificial Sequence
  Synthesized RNAi sequence
uguugguuggacucuaaaguua

SEQ ID NO: 13676 - RNA, 22 nt, Artificial Sequence
  Synthesized RNAi sequence
uguuguugacaauuccuauuac

SEQ ID NO: 13677 - RNA, 22 nt, Artificial Sequence
  Synthesized RNAi sequence
uguuuaacaagcguguuuaaag

SEQ ID NO: 13678 - RNA, 22 nt, Artificial Sequence
  Synthesized RNAi sequence
uguuucugagagagggucaagu

SEQ ID NO: 13679 - RNA, 22 nt, Artificial Sequence
  Synthesized RNAi sequence
uguuugaugaagccagcaucug

SEQ ID NO: 13680 - RNA, 22 nt, Artificial Sequence
  Synthesized RNAi sequence
uguuuuccuucaagguccauaa

SEQ ID NO: 13681 - RNA, 22 nt, Artificial Sequence
  Synthesized RNAi sequence
uuaaaaccuucaacaccauuac

SEQ ID NO: 13682 - RNA, 22 nt, Artificial Sequence
  Synthesized RNAi sequence
uuaaaaguggaaaaugaugcgg

SEQ ID NO: 13683 - RNA, 22 nt, Artificial Sequence
  Synthesized RNAi sequence
uuaaaauaaccaucaauauucu

SEQ ID NO: 13684 - RNA, 22 nt, Artificial Sequence
  Synthesized RNAi sequence
uuaaaauauuuaucuaacuccu

SEQ ID NO: 13685 - RNA, 22 nt, Artificial Sequence
  Synthesized RNAi sequence
uuaaaccuauaagccauuugca

SEQ ID NO: 13686 - RNA, 22 nt, Artificial Sequence
  Synthesized RNAi sequence
uuaaacuuuugugcacaaauga

SEQ ID NO: 13687 - RNA, 22 nt, Artificial Sequence
  Synthesized RNAi sequence
uuaaagcuugugcauuuugguu

SEQ ID NO: 13688 - RNA, 22 nt, Artificial Sequence
  Synthesized RNAi sequence
uuaaaugguaggacaggguuau

SEQ ID NO: 13689 - RNA, 22 nt, Artificial Sequence
  Synthesized RNAi sequence
uuaaauucuuggcaaccucauu

SEQ ID NO: 13690 - RNA, 22 nt, Artificial Sequence
  Synthesized RNAi sequence
uuaacaagcguguuuaaagcuu

SEQ ID NO: 13691 - RNA, 22 nt, Artificial Sequence
  Synthesized RNAi sequence
uuaacaauaaguagggacuggg

SEQ ID NO: 13692 - RNA, 22 nt, Artificial Sequence
  Synthesized RNAi sequence
uuaacacacugacuagagacua

SEQ ID NO: 13693 - RNA, 22 nt, Artificial Sequence
  Synthesized RNAi sequence
uuaacauccugauaaagaacag

SEQ ID NO: 13694 - RNA, 22 nt, Artificial Sequence
  Synthesized RNAi sequence
uuaauaacaacauuaguagcgu

SEQ ID NO: 13695 - RNA, 22 nt, Artificial Sequence
  Synthesized RNAi sequence
uuaauaccuauuggcaaaucua

SEQ ID NO: 13696 - RNA, 22 nt, Artificial Sequence
  Synthesized RNAi sequence
uuaauagaaaaguccuagguug

SEQ ID NO: 13697 - RNA, 22 nt, Artificial Sequence
  Synthesized RNAi sequence
uuaauaggcgugugcuuagaau

SEQ ID NO: 13698 - RNA, 22 nt, Artificial Sequence
  Synthesized RNAi sequence
uuaaugccagagaugucaccua

SEQ ID NO: 13699 - RNA, 22 nt, Artificial Sequence
  Synthesized RNAi sequence
uuaauuggugguguuuuguaaa

SEQ ID NO: 13700 - RNA, 22 nt, Artificial Sequence
  Synthesized RNAi sequence
uuaauuguugagucacauaugu

SEQ ID NO: 13701 - RNA, 22 nt, Artificial Sequence
  Synthesized RNAi sequence
uuaauuuaguaggagacacucc

SEQ ID NO: 13702 - RNA, 22 nt, Artificial Sequence
  Synthesized RNAi sequence
uuacaaaugaaucugcauagac

SEQ ID NO: 13703 - RNA, 22 nt, Artificial Sequence
  Synthesized RNAi sequence
uuacaacaucacaguuaccaga

SEQ ID NO: 13704 - RNA, 22 nt, Artificial Sequence
  Synthesized RNAi sequence
uuacaaggugugcuaccggccu

SEQ ID NO: 13705 - RNA, 22 nt, Artificial Sequence
  Synthesized RNAi sequence
uuaccagacacaaauguguugu

SEQ ID NO: 13706 - RNA, 22 nt, Artificial Sequence
  Synthesized RNAi sequence
uuacuauggcaaucaagccagc

SEQ ID NO: 13707 - RNA, 22 nt, Artificial Sequence
  Synthesized RNAi sequence
uuagaaguauuuguuccuggug

SEQ ID NO: 13708 - RNA, 22 nt, Artificial Sequence
  Synthesized RNAi sequence
uuagacuuccuaaacaaucuau

SEQ ID NO: 13709 - RNA, 22 nt, Artificial Sequence
  Synthesized RNAi sequence
uuagacuucucaguggaagcaa

SEQ ID NO: 13710 - RNA, 22 nt, Artificial Sequence
  Synthesized RNAi sequence
uuagcagaagcucugauuucug

SEQ ID NO: 13711 - RNA, 22 nt, Artificial Sequence
  Synthesized RNAi sequence
uuaggaaaucuaacaauagauu

SEQ ID NO: 13712 - RNA, 22 nt, Artificial Sequence
  Synthesized RNAi sequence
uuaguaaagcagagaucauuua

SEQ ID NO: 13713 - RNA, 22 nt, Artificial Sequence
  Synthesized RNAi sequence
uuaguaccauuggucccagaga

SEQ ID NO: 13714 - RNA, 22 nt, Artificial Sequence
  Synthesized RNAi sequence
uuaguagcagcaagauuagcag

SEQ ID NO: 13715 - RNA, 22 nt, Artificial Sequence
  Synthesized RNAi sequence
uuaguagcguuauuaacaauaa

SEQ ID NO: 13716 - RNA, 22 nt, Artificial Sequence
  Synthesized RNAi sequence
uuaguaggagacacuccauaac

SEQ ID NO: 13717 - RNA, 22 nt, Artificial Sequence
  Synthesized RNAi sequence
uuagucugagucugauaacuag

SEQ ID NO: 13718 - RNA, 22 nt, Artificial Sequence
  Synthesized RNAi sequence
uuaguggguuggaaaccauaug

SEQ ID NO: 13719 - RNA, 22 nt, Artificial Sequence
  Synthesized RNAi sequence
uuauaacacugacaccaccaaa

SEQ ID NO: 13720 - RNA, 22 nt, Artificial Sequence
  Synthesized RNAi sequence
uuauaaucagcaaucuuuccag

SEQ ID NO: 13721 - RNA, 22 nt, Artificial Sequence
  Synthesized RNAi sequence
uuauaauuaccaccaaccuuag

SEQ ID NO: 13722 - RNA, 22 nt, Artificial Sequence
  Synthesized RNAi sequence
uuauaauuauaaucagcaaucu

SEQ ID NO: 13723 - RNA, 22 nt, Artificial Sequence
  Synthesized RNAi sequence
uuauauacugcucauacuuucc

SEQ ID NO: 13724 - RNA, 22 nt, Artificial Sequence
  Synthesized RNAi sequence
uuauauaggacagaauaaucag

SEQ ID NO: 13725 - RNA, 22 nt, Artificial Sequence
  Synthesized RNAi sequence
uuauauuuuaauagaaaagucc

SEQ ID NO: 13726 - RNA, 22 nt, Artificial Sequence
  Synthesized RNAi sequence
uuaucaaaccucuuaguaccau

SEQ ID NO: 13727 - RNA, 22 nt, Artificial Sequence
  Synthesized RNAi sequence
uuauguguaauguaauuugacu

SEQ ID NO: 13728 - RNA, 22 nt, Artificial Sequence
  Synthesized RNAi sequence
uuauguuagacuucucagugga

SEQ ID NO: 13729 - RNA, 22 nt, Artificial Sequence
  Synthesized RNAi sequence
uuauuaacaauaaguagggacu

SEQ ID NO: 13730 - RNA, 22 nt, Artificial Sequence
  Synthesized RNAi sequence
uuauuagaguaagcaacugaau

SEQ ID NO: 13731 - RNA, 22 nt, Artificial Sequence
  Synthesized RNAi sequence
uuauucgcacuagaauaaacuc

SEQ ID NO: 13732 - RNA, 22 nt, Artificial Sequence
  Synthesized RNAi sequence
uucaaaagaaaguacuacuacu

SEQ ID NO: 13733 - RNA, 22 nt, Artificial Sequence
  Synthesized RNAi sequence
uucaaaagugcaauuauucgca

SEQ ID NO: 13734 - RNA, 22 nt, Artificial Sequence
  Synthesized RNAi sequence
uucaacaccauuacaaggugug

SEQ ID NO: 13735 - RNA, 22 nt, Artificial Sequence
  Synthesized RNAi sequence
uucaacguacacuuuguuucug

SEQ ID NO: 13736 - RNA, 22 nt, Artificial Sequence
  Synthesized RNAi sequence
uucaagguccauaagaaaaggc

SEQ ID NO: 13737 - RNA, 22 nt, Artificial Sequence
  Synthesized RNAi sequence
uucaauaaaugaccucuugcuu

SEQ ID NO: 13738 - RNA, 22 nt, Artificial Sequence
  Synthesized RNAi sequence
uucacagacuuuaauaacaaca

SEQ ID NO: 13739 - RNA, 22 nt, Artificial Sequence
  Synthesized RNAi sequence
uucagccccuauuaaacagccu

SEQ ID NO: 13740 - RNA, 22 nt, Artificial Sequence
  Synthesized RNAi sequence
uucagccucaacuuugucaaga

SEQ ID NO: 13741 - RNA, 22 nt, Artificial Sequence
  Synthesized RNAi sequence
uucagguugcaaaggaucauaa

SEQ ID NO: 13742 - RNA, 22 nt, Artificial Sequence
  Synthesized RNAi sequence
uucaguugaaauaucucucuca

SEQ ID NO: 13743 - RNA, 22 nt, Artificial Sequence
  Synthesized RNAi sequence
uucaguugaaucaccacaaaug

SEQ ID NO: 13744 - RNA, 22 nt, Artificial Sequence
  Synthesized RNAi sequence
uucaucaccucuaauuacaaau

SEQ ID NO: 13745 - RNA, 22 nt, Artificial Sequence
  Synthesized RNAi sequence
uucaucugugagcaaagguggc

SEQ ID NO: 13746 - RNA, 22 nt, Artificial Sequence
  Synthesized RNAi sequence
uucauuuaaauucuuggcaacc

SEQ ID NO: 13747 - RNA, 22 nt, Artificial Sequence
  Synthesized RNAi sequence
uuccaagcauaaacagaugcaa

SEQ ID NO: 13748 - RNA, 22 nt, Artificial Sequence
  Synthesized RNAi sequence
uuccaagugcacuugcugugga

SEQ ID NO: 13749 - RNA, 22 nt, Artificial Sequence
  Synthesized RNAi sequence
uuccaaguucuuggagaucgau

SEQ ID NO: 13750 - RNA, 22 nt, Artificial Sequence
  Synthesized RNAi sequence
uuccaguuugcccuggagcgau

SEQ ID NO: 13751 - RNA, 22 nt, Artificial Sequence
  Synthesized RNAi sequence
uuccaucaugacaaauggcagg

SEQ ID NO: 13752 - RNA, 22 nt, Artificial Sequence
  Synthesized RNAi sequence
uuccuaaacaaucuauacaggu

SEQ ID NO: 13753 - RNA, 22 nt, Artificial Sequence
  Synthesized RNAi sequence
uuccuauuacaacaucacaguu

SEQ ID NO: 13754 - RNA, 22 nt, Artificial Sequence
  Synthesized RNAi sequence
uuccugguguuauaacacugac

SEQ ID NO: 13755 - RNA, 22 nt, Artificial Sequence
  Synthesized RNAi sequence
uuccuguuccaagcauaaacag

SEQ ID NO: 13756 - RNA, 22 nt, Artificial Sequence
  Synthesized RNAi sequence
uuccuucaagguccauaagaaa

SEQ ID NO: 13757 - RNA, 22 nt, Artificial Sequence
  Synthesized RNAi sequence
uucgcacuagaauaaacucuga

SEQ ID NO: 13758 - RNA, 22 nt, Artificial Sequence
  Synthesized RNAi sequence
uucguuuauguguaauguaauu

SEQ ID NO: 13759 - RNA, 22 nt, Artificial Sequence
  Synthesized RNAi sequence
uucuauguaaagcaaguaaagu

SEQ ID NO: 13760 - RNA, 22 nt, Artificial Sequence
  Synthesized RNAi sequence
uucucaguggaagcaaaauaaa

SEQ ID NO: 13761 - RNA, 22 nt, Artificial Sequence
  Synthesized RNAi sequence
uucucuuccuguuccaagcaua

SEQ ID NO: 13762 - RNA, 22 nt, Artificial Sequence
  Synthesized RNAi sequence
uucugagagagggucaagugca

SEQ ID NO: 13763 - RNA, 22 nt, Artificial Sequence
  Synthesized RNAi sequence
uucugcaccaagugacauagug

SEQ ID NO: 13764 - RNA, 22 nt, Artificial Sequence
  Synthesized RNAi sequence
uucugcagcucuaauuaauugu

SEQ ID NO: 13765 - RNA, 22 nt, Artificial Sequence
  Synthesized RNAi sequence
uucugugcaguuaacauccuga

SEQ ID NO: 13766 - RNA, 22 nt, Artificial Sequence
  Synthesized RNAi sequence
uucugugguaacacuaauagua

SEQ ID NO: 13767 - RNA, 22 nt, Artificial Sequence
  Synthesized RNAi sequence
uucuguguaacuccaauaccau

SEQ ID NO: 13768 - RNA, 22 nt, Artificial Sequence
  Synthesized RNAi sequence
uucuguugguuggacucuaaag

SEQ ID NO: 13769 - RNA, 22 nt, Artificial Sequence
  Synthesized RNAi sequence
uucuuggagaucgaugagagau

SEQ ID NO: 13770 - RNA, 22 nt, Artificial Sequence
  Synthesized RNAi sequence
uucuuggcaaccucauugaggc

SEQ ID NO: 13771 - RNA, 22 nt, Artificial Sequence
  Synthesized RNAi sequence
uucuugugcagggacauaaguc

SEQ ID NO: 13772 - RNA, 22 nt, Artificial Sequence
  Synthesized RNAi sequence
uucuuuucuugugcagggacau

SEQ ID NO: 13773 - RNA, 22 nt, Artificial Sequence
  Synthesized RNAi sequence
uugaaaccuagugauguuaaua

SEQ ID NO: 13774 - RNA, 22 nt, Artificial Sequence
  Synthesized RNAi sequence
uugaaauaucucucucaaaagg

SEQ ID NO: 13775 - RNA, 22 nt, Artificial Sequence
  Synthesized RNAi sequence
uugaaauucacagacuuuaaua

SEQ ID NO: 13776 - RNA, 22 nt, Artificial Sequence
  Synthesized RNAi sequence
uugaaauugcaccaaaauugga

SEQ ID NO: 13777 - RNA, 22 nt, Artificial Sequence
  Synthesized RNAi sequence
uugaagauaacccacauaauaa

SEQ ID NO: 13778 - RNA, 22 nt, Artificial Sequence
  Synthesized RNAi sequence
uugaagucugccugugaucaac

SEQ ID NO: 13779 - RNA, 22 nt, Artificial Sequence
  Synthesized RNAi sequence
uugaaguuuuccaagugcacuu

SEQ ID NO: 13780 - RNA, 22 nt, Artificial Sequence
  Synthesized RNAi sequence
uugaaucaccacaaauguacau

SEQ ID NO: 13781 - RNA, 22 nt, Artificial Sequence
  Synthesized RNAi sequence
uugaaugagucuaauucagguu

SEQ ID NO: 13782 - RNA, 22 nt, Artificial Sequence
  Synthesized RNAi sequence
uugaauguaaaacugaggaucu

SEQ ID NO: 13783 - RNA, 22 nt, Artificial Sequence
  Synthesized RNAi sequence
uugaauuuugccaauagcacua

SEQ ID NO: 13784 - RNA, 22 nt, Artificial Sequence
  Synthesized RNAi sequence
uugacauguucagccccuauua

SEQ ID NO: 13785 - RNA, 22 nt, Artificial Sequence
  Synthesized RNAi sequence
uugacuagcuacacuacgugcc

SEQ ID NO: 13786 - RNA, 22 nt, Artificial Sequence
  Synthesized RNAi sequence
uugacuccuuugagcacuggcu

SEQ ID NO: 13787 - RNA, 22 nt, Artificial Sequence
  Synthesized RNAi sequence
uugagauuagacuuccuaaaca

SEQ ID NO: 13788 - RNA, 22 nt, Artificial Sequence
  Synthesized RNAi sequence
uugagcaaucauuucaucugug

SEQ ID NO: 13789 - RNA, 22 nt, Artificial Sequence
  Synthesized RNAi sequence
uugagcacuggcucagagucgu

SEQ ID NO: 13790 - RNA, 22 nt, Artificial Sequence
  Synthesized RNAi sequence
uugagucacauaugucugcaaa

SEQ ID NO: 13791 - RNA, 22 nt, Artificial Sequence
  Synthesized RNAi sequence
uugaucugcaugaauagcaaca

SEQ ID NO: 13792 - RNA, 22 nt, Artificial Sequence
  Synthesized RNAi sequence
uugaugaagccagcaucugcaa

SEQ ID NO: 13793 - RNA, 22 nt, Artificial Sequence
  Synthesized RNAi sequence
uugcaaaggaucauaaacugug

SEQ ID NO: 13794 - RNA, 22 nt, Artificial Sequence
  Synthesized RNAi sequence
uugcaccaaaauuggagcuaag

SEQ ID NO: 13795 - RNA, 22 nt, Artificial Sequence
  Synthesized RNAi sequence
uugcacuucagccucaacuuug

SEQ ID NO: 13796 - RNA, 22 nt, Artificial Sequence
  Synthesized RNAi sequence
uugcagcaggauccacaagaac

SEQ ID NO: 13797 - RNA, 22 nt, Artificial Sequence
  Synthesized RNAi sequence
uugcauagcaaaugguauuugu

SEQ ID NO: 13798 - RNA, 22 nt, Artificial Sequence
  Synthesized RNAi sequence
uugccaauagcacuauuaaauu

SEQ ID NO: 13799 - RNA, 22 nt, Artificial Sequence
  Synthesized RNAi sequence
uugcccuggagcgauuugucug

SEQ ID NO: 13800 - RNA, 22 nt, Artificial Sequence
  Synthesized RNAi sequence
uugcugauucucuuccuguucc

SEQ ID NO: 13801 - RNA, 22 nt, Artificial Sequence
  Synthesized RNAi sequence
uugcugcauucaguugaaucac

SEQ ID NO: 13802 - RNA, 22 nt, Artificial Sequence
  Synthesized RNAi sequence
uugcuggugcauguagaaguuc

SEQ ID NO: 13803 - RNA, 22 nt, Artificial Sequence
  Synthesized RNAi sequence
uugcuugguuuugauggaucug

SEQ ID NO: 13804 - RNA, 22 nt, Artificial Sequence
  Synthesized RNAi sequence
uuggaaaagaaagguaagaaca

SEQ ID NO: 13805 - RNA, 22 nt, Artificial Sequence
  Synthesized RNAi sequence
uuggaaaccauaugauuguaaa

SEQ ID NO: 13806 - RNA, 22 nt, Artificial Sequence
  Synthesized RNAi sequence
uuggacucuaaaguuagaaguu

SEQ ID NO: 13807 - RNA, 22 nt, Artificial Sequence
  Synthesized RNAi sequence
uuggagaucgaugagagauuca

SEQ ID NO: 13808 - RNA, 22 nt, Artificial Sequence
  Synthesized RNAi sequence
uuggagcuaaguuguuuaacaa

SEQ ID NO: 13809 - RNA, 22 nt, Artificial Sequence
  Synthesized RNAi sequence
uugguaaccaacaccauuagug

SEQ ID NO: 13810 - RNA, 22 nt, Artificial Sequence
  Synthesized RNAi sequence
uuggucauagacacugguagaa

SEQ ID NO: 13811 - RNA, 22 nt, Artificial Sequence
  Synthesized RNAi sequence
uuggucccagagacauguauag

SEQ ID NO: 13812 - RNA, 22 nt, Artificial Sequence
  Synthesized RNAi sequence
uuggugguguuuuguaaauuug

SEQ ID NO: 13813 - RNA, 22 nt, Artificial Sequence
  Synthesized RNAi sequence
uugguugaccacaucuugaagu

SEQ ID NO: 13814 - RNA, 22 nt, Artificial Sequence
  Synthesized RNAi sequence
uugguuggacucuaaaguuaga

SEQ ID NO: 13815 - RNA, 22 nt, Artificial Sequence
  Synthesized RNAi sequence
uuguaagauuaacacacugacu

SEQ ID NO: 13816 - RNA, 22 nt, Artificial Sequence
  Synthesized RNAi sequence
uuguaauauuaggaaaucuaac

SEQ ID NO: 13817 - RNA, 22 nt, Artificial Sequence
  Synthesized RNAi sequence
uuguaaugcagcaccugcacca

SEQ ID NO: 13818 - RNA, 22 nt, Artificial Sequence
  Synthesized RNAi sequence
uuguacaaucuacugaugucuu

SEQ ID NO: 13819 - RNA, 22 nt, Artificial Sequence
  Synthesized RNAi sequence
uuguacccgcuaacagugcaga

SEQ ID NO: 13820 - RNA, 22 nt, Artificial Sequence
  Synthesized RNAi sequence
uugucaagacgugaaaggauau

SEQ ID NO: 13821 - RNA, 22 nt, Artificial Sequence
  Synthesized RNAi sequence
uugucaggguaauaaacaccac

SEQ ID NO: 13822 - RNA, 22 nt, Artificial Sequence
  Synthesized RNAi sequence
uugucugacuucaucaccucua

SEQ ID NO: 13823 - RNA, 22 nt, Artificial Sequence
  Synthesized RNAi sequence
uugugcacaaaugaggucucua

SEQ ID NO: 13824 - RNA, 22 nt, Artificial Sequence
  Synthesized RNAi sequence
uugugcagggacauaagucaca

SEQ ID NO: 13825 - RNA, 22 nt, Artificial Sequence
  Synthesized RNAi sequence
uugugcauuuugguugaccaca

SEQ ID NO: 13826 - RNA, 22 nt, Artificial Sequence
  Synthesized RNAi sequence
uuguggguauggcaauagaguu

SEQ ID NO: 13827 - RNA, 22 nt, Artificial Sequence
  Synthesized RNAi sequence
uuguuccugguguuauaacacu

SEQ ID NO: 13828 - RNA, 22 nt, Artificial Sequence
  Synthesized RNAi sequence
uuguugaaaaguagaucuucaa

SEQ ID NO: 13829 - RNA, 22 nt, Artificial Sequence
  Synthesized RNAi sequence
uuguugacaauuccuauuacaa

SEQ ID NO: 13830 - RNA, 22 nt, Artificial Sequence
  Synthesized RNAi sequence
uuguugacauguucagccccua

SEQ ID NO: 13831 - RNA, 22 nt, Artificial Sequence
  Synthesized RNAi sequence
uuguugagucacauaugucugc

SEQ ID NO: 13832 - RNA, 22 nt, Artificial Sequence
  Synthesized RNAi sequence
uuguuuaacaagcguguuuaaa

SEQ ID NO: 13833 - RNA, 22 nt, Artificial Sequence
  Synthesized RNAi sequence
uuguuucugagagagggucaag

SEQ ID NO: 13834 - RNA, 22 nt, Artificial Sequence
  Synthesized RNAi sequence
uuuaaaauaaccaucaauauuc

SEQ ID NO: 13835 - RNA, 22 nt, Artificial Sequence
  Synthesized RNAi sequence
uuuaaagcuugugcauuuuggu

SEQ ID NO: 13836 - RNA, 22 nt, Artificial Sequence
  Synthesized RNAi sequence
uuuaaauucuuggcaaccucau

SEQ ID NO: 13837 - RNA, 22 nt, Artificial Sequence
  Synthesized RNAi sequence
uuuaacaagcguguuuaaagcu

SEQ ID NO: 13838 - RNA, 22 nt, Artificial Sequence
  Synthesized RNAi sequence
uuuaauaacaacauuaguagcg

SEQ ID NO: 13839 - RNA, 22 nt, Artificial Sequence
  Synthesized RNAi sequence
uuuaauagaaaaguccuagguu

SEQ ID NO: 13840 - RNA, 22 nt, Artificial Sequence
  Synthesized RNAi sequence
uuuaauuggugguguuuuguaa

SEQ ID NO: 13841 - RNA, 22 nt, Artificial Sequence
  Synthesized RNAi sequence
uuuaguagcagcaagauuagca

SEQ ID NO: 13842 - RNA, 22 nt, Artificial Sequence
  Synthesized RNAi sequence
uuuaguaggagacacuccauaa

SEQ ID NO: 13843 - RNA, 22 nt, Artificial Sequence
  Synthesized RNAi sequence
uuuauaauuauaaucagcaauc

SEQ ID NO: 13844 - RNA, 22 nt, Artificial Sequence
  Synthesized RNAi sequence
uuuauauacugcucauacuuuc

SEQ ID NO: 13845 - RNA, 22 nt, Artificial Sequence
  Synthesized RNAi sequence
uuuaucuaacuccuccuugaau

SEQ ID NO: 13846 - RNA, 22 nt, Artificial Sequence
  Synthesized RNAi sequence
uuuauguguaauguaauuugac

SEQ ID NO: 13847 - RNA, 22 nt, Artificial Sequence
  Synthesized RNAi sequence
uuucaacguacacuuuguuucu

SEQ ID NO: 13848 - RNA, 22 nt, Artificial Sequence
  Synthesized RNAi sequence
uuucaguugaaauaucucucuc

SEQ ID NO: 13849 - RNA, 22 nt, Artificial Sequence
  Synthesized RNAi sequence
uuucaucugugagcaaaggugg

SEQ ID NO: 13850 - RNA, 22 nt, Artificial Sequence
  Synthesized RNAi sequence
uuuccaagugcacuugcugugg

SEQ ID NO: 13851 - RNA, 22 nt, Artificial Sequence
  Synthesized RNAi sequence
uuuccaaguucuuggagaucga

SEQ ID NO: 13852 - RNA, 22 nt, Artificial Sequence
  Synthesized RNAi sequence
uuuccaguuugcccuggagcga

SEQ ID NO: 13853 - RNA, 22 nt, Artificial Sequence
  Synthesized RNAi sequence
uuuccaucaugacaaauggcag

SEQ ID NO: 13854 - RNA, 22 nt, Artificial Sequence
  Synthesized RNAi sequence
uuuccuucaagguccauaagaa

SEQ ID NO: 13855 - RNA, 22 nt, Artificial Sequence
  Synthesized RNAi sequence
uuucugagagagggucaagugc

SEQ ID NO: 13856 - RNA, 22 nt, Artificial Sequence
  Synthesized RNAi sequence
uuucugcaccaagugacauagu

SEQ ID NO: 13857 - RNA, 22 nt, Artificial Sequence
  Synthesized RNAi sequence
uuucugcagcucuaauuaauug

SEQ ID NO: 13858 - RNA, 22 nt, Artificial Sequence
  Synthesized RNAi sequence
uuucugugguaacacuaauagu

SEQ ID NO: 13859 - RNA, 22 nt, Artificial Sequence
  Synthesized RNAi sequence
uuucuugugcagggacauaagu

SEQ ID NO: 13860 - RNA, 22 nt, Artificial Sequence
  Synthesized RNAi sequence
uuugaaacaaagacaccuucac

SEQ ID NO: 13861 - RNA, 22 nt, Artificial Sequence
  Synthesized RNAi sequence
uuugaaaccuagugauguuaau

SEQ ID NO: 13862 - RNA, 22 nt, Artificial Sequence
  Synthesized RNAi sequence
uuugaagucugccugugaucaa

SEQ ID NO: 13863 - RNA, 22 nt, Artificial Sequence
  Synthesized RNAi sequence
uuugacuccuuugagcacuggc

SEQ ID NO: 13864 - RNA, 22 nt, Artificial Sequence
  Synthesized RNAi sequence
uuugagauuagacuuccuaaac

SEQ ID NO: 13865 - RNA, 22 nt, Artificial Sequence
  Synthesized RNAi sequence
uuugagcacuggcucagagucg

SEQ ID NO: 13866 - RNA, 22 nt, Artificial Sequence
  Synthesized RNAi sequence
uuugcacuucagccucaacuuu

SEQ ID NO: 13867 - RNA, 22 nt, Artificial Sequence
  Synthesized RNAi sequence
uuugcauagcaaaugguauuug

SEQ ID NO: 13868 - RNA, 22 nt, Artificial Sequence
  Synthesized RNAi sequence
uuugccaauagcacuauuaaau

SEQ ID NO: 13869 - RNA, 22 nt, Artificial Sequence
  Synthesized RNAi sequence
uuugcccuggagcgauuugucu

SEQ ID NO: 13870 - RNA, 22 nt, Artificial Sequence
  Synthesized RNAi sequence
uuugguugaccacaucuugaag

SEQ ID NO: 13871 - RNA, 22 nt, Artificial Sequence
  Synthesized RNAi sequence
uuuguaauauuaggaaaucuaa

SEQ ID NO: 13872 - RNA, 22 nt, Artificial Sequence
  Synthesized RNAi sequence
uuuguaaugcagcaccugcacc

SEQ ID NO: 13873 - RNA, 22 nt, Artificial Sequence
  Synthesized RNAi sequence
uuugucaagacgugaaaggaua

SEQ ID NO: 13874 - RNA, 22 nt, Artificial Sequence
  Synthesized RNAi sequence
uuugucaggguaauaaacacca

SEQ ID NO: 13875 - RNA, 22 nt, Artificial Sequence
  Synthesized RNAi sequence
uuugucugacuucaucaccucu

SEQ ID NO: 13876 - RNA, 22 nt, Artificial Sequence
  Synthesized RNAi sequence
uuugugcacaaaugaggucucu

SEQ ID NO: 13877 - RNA, 22 nt, Artificial Sequence
  Synthesized RNAi sequence
uuuguggguauggcaauagagu

SEQ ID NO: 13878 - RNA, 22 nt, Artificial Sequence
  Synthesized RNAi sequence
uuuguugaaaaguagaucuuca

SEQ ID NO: 13879 - RNA, 22 nt, Artificial Sequence
  Synthesized RNAi sequence
uuuguuucugagagagggucaa

SEQ ID NO: 13880 - RNA, 22 nt, Artificial Sequence
  Synthesized RNAi sequence
uuuuaauagaaaaguccuaggu

SEQ ID NO: 13881 - RNA, 22 nt, Artificial Sequence
  Synthesized RNAi sequence
uuuuaguagcagcaagauuagc

SEQ ID NO: 13882 - RNA, 22 nt, Artificial Sequence
  Synthesized RNAi sequence
uuuuauauacugcucauacuuu

SEQ ID NO: 13883 - RNA, 22 nt, Artificial Sequence
  Synthesized RNAi sequence
uuuuccaucaugacaaauggca

SEQ ID NO: 13884 - RNA, 22 nt, Artificial Sequence
  Synthesized RNAi sequence
uuuuccuucaagguccauaaga

SEQ ID NO: 13885 - RNA, 22 nt, Artificial Sequence
  Synthesized RNAi sequence
uuuucugcaccaagugacauag

SEQ ID NO: 13886 - RNA, 22 nt, Artificial Sequence
  Synthesized RNAi sequence
uuuucuugugcagggacauaag

SEQ ID NO: 13887 - RNA, 22 nt, Artificial Sequence
  Synthesized RNAi sequence
uuuugccaauagcacuauuaaa

SEQ ID NO: 13888 - RNA, 22 nt, Artificial Sequence
  Synthesized RNAi sequence
uuuugguugaccacaucuugaa

SEQ ID NO: 13889 - RNA, 22 nt, Artificial Sequence
  Synthesized RNAi sequence
uuuugugcacaaaugaggucuc

SEQ ID NO: 13890 - RNA, 22 nt, Artificial Sequence
  Synthesized RNAi sequence
aaaccagggacaaggcucucca

SEQ ID NO: 13891 - RNA, 22 nt, Artificial Sequence
  Synthesized RNAi sequence
aaaccguaagcagccugcagaa

SEQ ID NO: 13892 - RNA, 22 nt, Artificial Sequence
  Synthesized RNAi sequence
aaaccuagaugugcugaugauc

SEQ ID NO: 13893 - RNA, 22 nt, Artificial Sequence
  Synthesized RNAi sequence
aaacgaaugaguacauaaguuc

SEQ ID NO: 13894 - RNA, 22 nt, Artificial Sequence
  Synthesized RNAi sequence
aaacggaaaagcgaaaacguuu

SEQ ID NO: 13895 - RNA, 22 nt, Artificial Sequence
  Synthesized RNAi sequence
aaacguuuauauagcccaucug

SEQ ID NO: 13896 - RNA, 22 nt, Artificial Sequence
  Synthesized RNAi sequence
aaagcgaaaacguuuauauagc

SEQ ID NO: 13897 - RNA, 22 nt, Artificial Sequence
  Synthesized RNAi sequence
aaaucacauggggauagcacua

SEQ ID NO: 13898 - RNA, 22 nt, Artificial Sequence
  Synthesized RNAi sequence
aaaugugguggcucuuucaagu

SEQ ID NO: 13899 - RNA, 22 nt, Artificial Sequence
  Synthesized RNAi sequence
aaauuaauuuuacacauuaggg

SEQ ID NO: 13900 - RNA, 22 nt, Artificial Sequence
  Synthesized RNAi sequence
aacacggacgaaaccguaagca

SEQ ID NO: 13901 - RNA, 22 nt, Artificial Sequence
  Synthesized RNAi sequence
aaccagggacaaggcucuccau

SEQ ID NO: 13902 - RNA, 22 nt, Artificial Sequence
  Synthesized RNAi sequence
aaccguaagcagccugcagaag

SEQ ID NO: 13903 - RNA, 22 nt, Artificial Sequence
  Synthesized RNAi sequence
aaccuagaugugcugaugaucg

SEQ ID NO: 13904 - RNA, 22 nt, Artificial Sequence
  Synthesized RNAi sequence
aaccugaaagucaacgagauga

SEQ ID NO: 13905 - RNA, 22 nt, Artificial Sequence
  Synthesized RNAi sequence
aacgaaugaguacauaaguucg

SEQ ID NO: 13906 - RNA, 22 nt, Artificial Sequence
  Synthesized RNAi sequence
aacgacaguaauuaguuauuaa

SEQ ID NO: 13907 - RNA, 22 nt, Artificial Sequence
  Synthesized RNAi sequence
aacggaaaagcgaaaacguuua

SEQ ID NO: 13908 - RNA, 22 nt, Artificial Sequence
  Synthesized RNAi sequence
aacguaccugucucuuccgaaa

SEQ ID NO: 13909 - RNA, 22 nt, Artificial Sequence
  Synthesized RNAi sequence
aacguuuauauagcccaucugc

SEQ ID NO: 13910 - RNA, 22 nt, Artificial Sequence
  Synthesized RNAi sequence
aagaagcuauuaaaaucacaug

SEQ ID NO: 13911 - RNA, 22 nt, Artificial Sequence
  Synthesized RNAi sequence
aagauagacgaguuacucgugu

SEQ ID NO: 13912 - RNA, 22 nt, Artificial Sequence
  Synthesized RNAi sequence
aagcagccugcagaagauagac

SEQ ID NO: 13913 - RNA, 22 nt, Artificial Sequence
  Synthesized RNAi sequence
aagcaugcagccgagugacagc

SEQ ID NO: 13914 - RNA, 22 nt, Artificial Sequence
  Synthesized RNAi sequence
aagcgaaaacguuuauauagcc

SEQ ID NO: 13915 - RNA, 22 nt, Artificial Sequence
  Synthesized RNAi sequence
aagcuauuaaaaucacaugggg

SEQ ID NO: 13916 - RNA, 22 nt, Artificial Sequence
  Synthesized RNAi sequence
aaggcucuccaucuuaccuuuc

SEQ ID NO: 13917 - RNA, 22 nt, Artificial Sequence
  Synthesized RNAi sequence
aaguccucccuaauguuacaca

SEQ ID NO: 13918 - RNA, 22 nt, Artificial Sequence
  Synthesized RNAi sequence
aauaguaccguuggaaucugcc

SEQ ID NO: 13919 - RNA, 22 nt, Artificial Sequence
  Synthesized RNAi sequence
aaucacauggggauagcacuac

SEQ ID NO: 13920 - RNA, 22 nt, Artificial Sequence
  Synthesized RNAi sequence
aaucugccauggcuaaaauuaa

SEQ ID NO: 13921 - RNA, 22 nt, Artificial Sequence
  Synthesized RNAi sequence
aaugugguggcucuuucaaguc

SEQ ID NO: 13922 - RNA, 22 nt, Artificial Sequence
  Synthesized RNAi sequence
aauuaauuuuacacauuagggc

SEQ ID NO: 13923 - RNA, 22 nt, Artificial Sequence
  Synthesized RNAi sequence
aauuaguuauuaauuauacugc

SEQ ID NO: 13924 - RNA, 22 nt, Artificial Sequence
  Synthesized RNAi sequence
aauuauacugcgugagugcacu

SEQ ID NO: 13925 - RNA, 22 nt, Artificial Sequence
  Synthesized RNAi sequence
aauuuuacacauuagggcucuu

SEQ ID NO: 13926 - RNA, 22 nt, Artificial Sequence
  Synthesized RNAi sequence
acaaggcucuccaucuuaccuu

SEQ ID NO: 13927 - RNA, 22 nt, Artificial Sequence
  Synthesized RNAi sequence
acacauuagggcucuuccauau

SEQ ID NO: 13928 - RNA, 22 nt, Artificial Sequence
  Synthesized RNAi sequence
acacccggacgaaaccuagaug

SEQ ID NO: 13929 - RNA, 22 nt, Artificial Sequence
  Synthesized RNAi sequence
acacggacgaaaccguaagcag

SEQ ID NO: 13930 - RNA, 22 nt, Artificial Sequence
  Synthesized RNAi sequence
acacucgaucguacuccgcgug

SEQ ID NO: 13931 - RNA, 22 nt, Artificial Sequence
  Synthesized RNAi sequence
acagauuuuaaaguucguuuag

SEQ ID NO: 13932 - RNA, 22 nt, Artificial Sequence
  Synthesized RNAi sequence
acagccacacagauuuuaaagu

SEQ ID NO: 13933 - RNA, 22 nt, Artificial Sequence
  Synthesized RNAi sequence
acauggggauagcacuacuaaa

SEQ ID NO: 13934 - RNA, 22 nt, Artificial Sequence
  Synthesized RNAi sequence
acauuagggcucuuccauauag

SEQ ID NO: 13935 - RNA, 22 nt, Artificial Sequence
  Synthesized RNAi sequence
accagggacaaggcucuccauc

SEQ ID NO: 13936 - RNA, 22 nt, Artificial Sequence
  Synthesized RNAi sequence
acccggacgaaaccuagaugug

SEQ ID NO: 13937 - RNA, 22 nt, Artificial Sequence
  Synthesized RNAi sequence
accguaagcagccugcagaaga

SEQ ID NO: 13938 - RNA, 22 nt, Artificial Sequence
  Synthesized RNAi sequence
accguuggaaucugccauggcu

SEQ ID NO: 13939 - RNA, 22 nt, Artificial Sequence
  Synthesized RNAi sequence
accuagaugugcugaugaucgg

SEQ ID NO: 13940 - RNA, 22 nt, Artificial Sequence
  Synthesized RNAi sequence
accugaaagucaacgagaugaa

SEQ ID NO: 13941 - RNA, 22 nt, Artificial Sequence
  Synthesized RNAi sequence
accugucucuuccgaaacgaau

SEQ ID NO: 13942 - RNA, 22 nt, Artificial Sequence
  Synthesized RNAi sequence
acgaaaccguaagcagccugca

SEQ ID NO: 13943 - RNA, 22 nt, Artificial Sequence
  Synthesized RNAi sequence
acgaaaccuagaugugcugaug

SEQ ID NO: 13944 - RNA, 22 nt, Artificial Sequence
  Synthesized RNAi sequence
acgaaugaguacauaaguucgu

SEQ ID NO: 13945 - RNA, 22 nt, Artificial Sequence
  Synthesized RNAi sequence
acgacaguaauuaguuauuaau

SEQ ID NO: 13946 - RNA, 22 nt, Artificial Sequence
  Synthesized RNAi sequence
acgaguuacucguguccuguca

SEQ ID NO: 13947 - RNA, 22 nt, Artificial Sequence
  Synthesized RNAi sequence
acggaaaagcgaaaacguuuau

SEQ ID NO: 13948 - RNA, 22 nt, Artificial Sequence
  Synthesized RNAi sequence
acggacgaaaccguaagcagcc

SEQ ID NO: 13949 - RNA, 22 nt, Artificial Sequence
  Synthesized RNAi sequence
acgguaauaguaccguuggaau

SEQ ID NO: 13950 - RNA, 22 nt, Artificial Sequence
  Synthesized RNAi sequence
acguaccugucucuuccgaaac

SEQ ID NO: 13951 - RNA, 22 nt, Artificial Sequence
  Synthesized RNAi sequence
acguuuauauagcccaucugcc

SEQ ID NO: 13952 - RNA, 22 nt, Artificial Sequence
  Synthesized RNAi sequence
acuaagcaugcagccgagugac

SEQ ID NO: 13953 - RNA, 22 nt, Artificial Sequence
  Synthesized RNAi sequence
acuacuaaaauuaauuuuacac

SEQ ID NO: 13954 - RNA, 22 nt, Artificial Sequence
  Synthesized RNAi sequence
acucguguccugucaacgacag

SEQ ID NO: 13955 - RNA, 22 nt, Artificial Sequence
  Synthesized RNAi sequence
acugcgugagugcacuaagcau

SEQ ID NO: 13956 - RNA, 22 nt, Artificial Sequence
  Synthesized RNAi sequence
acuguacacucgaucguacucc

SEQ ID NO: 13957 - RNA, 22 nt, Artificial Sequence
  Synthesized RNAi sequence
agaagauagacgaguuacucgu

SEQ ID NO: 13958 - RNA, 22 nt, Artificial Sequence
  Synthesized RNAi sequence
agaagcuauuaaaaucacaugg

SEQ ID NO: 13959 - RNA, 22 nt, Artificial Sequence
  Synthesized RNAi sequence
agacgaguuacucguguccugu

SEQ ID NO: 13960 - RNA, 22 nt, Artificial Sequence
  Synthesized RNAi sequence
agauagacgaguuacucguguc

SEQ ID NO: 13961 - RNA, 22 nt, Artificial Sequence
  Synthesized RNAi sequence
agaugugcugaugaucggcugc

SEQ ID NO: 13962 - RNA, 22 nt, Artificial Sequence
  Synthesized RNAi sequence
agcagccugcagaagauagacg

SEQ ID NO: 13963 - RNA, 22 nt, Artificial Sequence
  Synthesized RNAi sequence
agccacacagauuuuaaaguuc

SEQ ID NO: 13964 - RNA, 22 nt, Artificial Sequence
  Synthesized RNAi sequence
agccgagugacagccacacaga

SEQ ID NO: 13965 - RNA, 22 nt, Artificial Sequence
  Synthesized RNAi sequence
agccugcagaagauagacgagu

SEQ ID NO: 13966 - RNA, 22 nt, Artificial Sequence
  Synthesized RNAi sequence
agcgaaaacguuuauauagccc

SEQ ID NO: 13967 - RNA, 22 nt, Artificial Sequence
  Synthesized RNAi sequence
agcucucccuagcauuguucac

SEQ ID NO: 13968 - RNA, 22 nt, Artificial Sequence
  Synthesized RNAi sequence
aggcucuccaucuuaccuuucg

SEQ ID NO: 13969 - RNA, 22 nt, Artificial Sequence
  Synthesized RNAi sequence
agggacaaggcucuccaucuua

SEQ ID NO: 13970 - RNA, 22 nt, Artificial Sequence
  Synthesized RNAi sequence
agggcucuuccauauaggcagc

SEQ ID NO: 13971 - RNA, 22 nt, Artificial Sequence
  Synthesized RNAi sequence
aguaaccugaaagucaacgaga

SEQ ID NO: 13972 - RNA, 22 nt, Artificial Sequence
  Synthesized RNAi sequence
aguaccguuggaaucugccaug

SEQ ID NO: 13973 - RNA, 22 nt, Artificial Sequence
  Synthesized RNAi sequence
agugacagccacacagauuuua

SEQ ID NO: 13974 - RNA, 22 nt, Artificial Sequence
  Synthesized RNAi sequence
agugcacuaagcaugcagccga

SEQ ID NO: 13975 - RNA, 22 nt, Artificial Sequence
  Synthesized RNAi sequence
aguuacucguguccugucaacg

SEQ ID NO: 13976 - RNA, 22 nt, Artificial Sequence
  Synthesized RNAi sequence
aguuauuaauuauacugcguga

SEQ ID NO: 13977 - RNA, 22 nt, Artificial Sequence
  Synthesized RNAi sequence
auacugcgugagugcacuaagc

SEQ ID NO: 13978 - RNA, 22 nt, Artificial Sequence
  Synthesized RNAi sequence
auagacgaguuacucguguccu

SEQ ID NO: 13979 - RNA, 22 nt, Artificial Sequence
  Synthesized RNAi sequence
auaggcagcucucccuagcauu

SEQ ID NO: 13980 - RNA, 22 nt, Artificial Sequence
  Synthesized RNAi sequence
auaguaaccugaaagucaacga

SEQ ID NO: 13981 - RNA, 22 nt, Artificial Sequence
  Synthesized RNAi sequence
auaguaccguuggaaucugcca

SEQ ID NO: 13982 - RNA, 22 nt, Artificial Sequence
  Synthesized RNAi sequence
auauaggcagcucucccuagca

SEQ ID NO: 13983 - RNA, 22 nt, Artificial Sequence
  Synthesized RNAi sequence
aucacauggggauagcacuacu

SEQ ID NO: 13984 - RNA, 22 nt, Artificial Sequence
  Synthesized RNAi sequence
aucggcugcaacacggacgaaa

SEQ ID NO: 13985 - RNA, 22 nt, Artificial Sequence
  Synthesized RNAi sequence
aucugccauggcuaaaauuaaa

SEQ ID NO: 13986 - RNA, 22 nt, Artificial Sequence
  Synthesized RNAi sequence
aucuuaccuuucggucacaccc

SEQ ID NO: 13987 - RNA, 22 nt, Artificial Sequence
  Synthesized RNAi sequence
augaucggcugcaacacggacg

SEQ ID NO: 13988 - RNA, 22 nt, Artificial Sequence
  Synthesized RNAi sequence
augcagccgagugacagccaca

SEQ ID NO: 13989 - RNA, 22 nt, Artificial Sequence
  Synthesized RNAi sequence
auggggauagcacuacuaaaau

SEQ ID NO: 13990 - RNA, 22 nt, Artificial Sequence
  Synthesized RNAi sequence
augugcugaugaucggcugcaa

SEQ ID NO: 13991 - RNA, 22 nt, Artificial Sequence
  Synthesized RNAi sequence
augugguggcucuuucaagucc

SEQ ID NO: 13992 - RNA, 22 nt, Artificial Sequence
  Synthesized RNAi sequence
auuaaaaucacauggggauagc

SEQ ID NO: 13993 - RNA, 22 nt, Artificial Sequence
  Synthesized RNAi sequence
auuaauuauacugcgugagugc

SEQ ID NO: 13994 - RNA, 22 nt, Artificial Sequence
  Synthesized RNAi sequence
auuaauuuuacacauuagggcu

SEQ ID NO: 13995 - RNA, 22 nt, Artificial Sequence
  Synthesized RNAi sequence
auuagggcucuuccauauaggc

SEQ ID NO: 13996 - RNA, 22 nt, Artificial Sequence
  Synthesized RNAi sequence
auuaguuauuaauuauacugcg

SEQ ID NO: 13997 - RNA, 22 nt, Artificial Sequence
  Synthesized RNAi sequence
auuauacugcgugagugcacua

SEQ ID NO: 13998 - RNA, 22 nt, Artificial Sequence
  Synthesized RNAi sequence
auuguucacuguacacucgauc

SEQ ID NO: 13999 - RNA, 22 nt, Artificial Sequence
  Synthesized RNAi sequence
auuucgcugauuuuggggucca

SEQ ID NO: 14000 - RNA, 22 nt, Artificial Sequence
  Synthesized RNAi sequence
auuuuacacauuagggcucuuc

SEQ ID NO: 14001 - RNA, 22 nt, Artificial Sequence
  Synthesized RNAi sequence
auuuugggguccauuaucagac

SEQ ID NO: 14002 - RNA, 22 nt, Artificial Sequence
  Synthesized RNAi sequence
uaaaaucacauggggauagcac

SEQ ID NO: 14003 - RNA, 22 nt, Artificial Sequence
  Synthesized RNAi sequence
uaaacggaaaagcgaaaacguu

SEQ ID NO: 14004 - RNA, 22 nt, Artificial Sequence
  Synthesized RNAi sequence
uaaccugaaagucaacgagaug

SEQ ID NO: 14005 - RNA, 22 nt, Artificial Sequence
  Synthesized RNAi sequence
uaagaagcuauuaaaaucacau

SEQ ID NO: 14006 - RNA, 22 nt, Artificial Sequence
  Synthesized RNAi sequence
uaagcagccugcagaagauaga

SEQ ID NO: 14007 - RNA, 22 nt, Artificial Sequence
  Synthesized RNAi sequence
uaagcaugcagccgagugacag

SEQ ID NO: 14008 - RNA, 22 nt, Artificial Sequence
  Synthesized RNAi sequence
uaauaguaccguuggaaucugc

SEQ ID NO: 14009 - RNA, 22 nt, Artificial Sequence
  Synthesized RNAi sequence
uaauuauacugcgugagugcac

SEQ ID NO: 14010 - RNA, 22 nt, Artificial Sequence
  Synthesized RNAi sequence
uaauuuuacacauuagggcucu

SEQ ID NO: 14011 - RNA, 22 nt, Artificial Sequence
  Synthesized RNAi sequence
uacacauuagggcucuuccaua

SEQ ID NO: 14012 - RNA, 22 nt, Artificial Sequence
  Synthesized RNAi sequence
uaccguuggaaucugccauggc

SEQ ID NO: 14013 - RNA, 22 nt, Artificial Sequence
  Synthesized RNAi sequence
uaccugucucuuccgaaacgaa

SEQ ID NO: 14014 - RNA, 22 nt, Artificial Sequence
  Synthesized RNAi sequence
uaccuuucggucacacccggac

SEQ ID NO: 14015 - RNA, 22 nt, Artificial Sequence
  Synthesized RNAi sequence
uacucguguccugucaacgaca

SEQ ID NO: 14016 - RNA, 22 nt, Artificial Sequence
  Synthesized RNAi sequence
uacugcgugagugcacuaagca

SEQ ID NO: 14017 - RNA, 22 nt, Artificial Sequence
  Synthesized RNAi sequence
uagacgaguuacucguguccug

SEQ ID NO: 14018 - RNA, 22 nt, Artificial Sequence
  Synthesized RNAi sequence
uagaugugcugaugaucggcug

SEQ ID NO: 14019 - RNA, 22 nt, Artificial Sequence
  Synthesized RNAi sequence
uagcauuguucacuguacacuc

SEQ ID NO: 14020 - RNA, 22 nt, Artificial Sequence
  Synthesized RNAi sequence
uaggcagcucucccuagcauug

SEQ ID NO: 14021 - RNA, 22 nt, Artificial Sequence
  Synthesized RNAi sequence
uagggcucuuccauauaggcag

SEQ ID NO: 14022 - RNA, 22 nt, Artificial Sequence
  Synthesized RNAi sequence
uaguaaccugaaagucaacgag

SEQ ID NO: 14023 - RNA, 22 nt, Artificial Sequence
  Synthesized RNAi sequence
uaguaccguuggaaucugccau

SEQ ID NO: 14024 - RNA, 22 nt, Artificial Sequence
  Synthesized RNAi sequence
uaguuauuaauuauacugcgug

SEQ ID NO: 14025 - RNA, 22 nt, Artificial Sequence
  Synthesized RNAi sequence
uauacugcgugagugcacuaag

SEQ ID NO: 14026 - RNA, 22 nt, Artificial Sequence
  Synthesized RNAi sequence
uauaggcagcucucccuagcau

SEQ ID NO: 14027 - RNA, 22 nt, Artificial Sequence
  Synthesized RNAi sequence
uauaguaaccugaaagucaacg

SEQ ID NO: 14028 - RNA, 22 nt, Artificial Sequence
  Synthesized RNAi sequence
uauuaaaaucacauggggauag

SEQ ID NO: 14029 - RNA, 22 nt, Artificial Sequence
  Synthesized RNAi sequence
uauuaauuauacugcgugagug

SEQ ID NO: 14030 - RNA, 22 nt, Artificial Sequence
  Synthesized RNAi sequence
ucaacgacaguaauuaguuauu

SEQ ID NO: 14031 - RNA, 22 nt, Artificial Sequence
  Synthesized RNAi sequence
ucaaguccucccuaauguuaca

SEQ ID NO: 14032 - RNA, 22 nt, Artificial Sequence
  Synthesized RNAi sequence
ucacacccggacgaaaccuaga

SEQ ID NO: 14033 - RNA, 22 nt, Artificial Sequence
  Synthesized RNAi sequence
ucacauggggauagcacuacua

SEQ ID NO: 14034 - RNA, 22 nt, Artificial Sequence
  Synthesized RNAi sequence
ucacuguacacucgaucguacu

SEQ ID NO: 14035 - RNA, 22 nt, Artificial Sequence
  Synthesized RNAi sequence
uccauauaggcagcucucccua

SEQ ID NO: 14036 - RNA, 22 nt, Artificial Sequence
  Synthesized RNAi sequence
uccaucuuaccuuucggucaca

SEQ ID NO: 14037 - RNA, 22 nt, Artificial Sequence
  Synthesized RNAi sequence
ucccuagcauuguucacuguac

SEQ ID NO: 14038 - RNA, 22 nt, Artificial Sequence
  Synthesized RNAi sequence
uccgaaacgaaugaguacauaa

SEQ ID NO: 14039 - RNA, 22 nt, Artificial Sequence
  Synthesized RNAi sequence
uccugucaacgacaguaauuag

SEQ ID NO: 14040 - RNA, 22 nt, Artificial Sequence
  Synthesized RNAi sequence
ucgcugauuuugggguccauua

SEQ ID NO: 14041 - RNA, 22 nt, Artificial Sequence
  Synthesized RNAi sequence
ucggcugcaacacggacgaaac

SEQ ID NO: 14042 - RNA, 22 nt, Artificial Sequence
  Synthesized RNAi sequence
ucggugaaaaugugguggcucu

SEQ ID NO: 14043 - RNA, 22 nt, Artificial Sequence
  Synthesized RNAi sequence
ucguguccugucaacgacagua

SEQ ID NO: 14044 - RNA, 22 nt, Artificial Sequence
  Synthesized RNAi sequence
ucguugaaaccagggacaaggc

SEQ ID NO: 14045 - RNA, 22 nt, Artificial Sequence
  Synthesized RNAi sequence
ucuccaucuuaccuuucgguca

SEQ ID NO: 14046 - RNA, 22 nt, Artificial Sequence
  Synthesized RNAi sequence
ucucccuagcauuguucacugu

SEQ ID NO: 14047 - RNA, 22 nt, Artificial Sequence
  Synthesized RNAi sequence
ucucguugaaaccagggacaag

SEQ ID NO: 14048 - RNA, 22 nt, Artificial Sequence
  Synthesized RNAi sequence
ucucuuccgaaacgaaugagua

SEQ ID NO: 14049 - RNA, 22 nt, Artificial Sequence
  Synthesized RNAi sequence
ucuuaccuuucggucacacccg

SEQ ID NO: 14050 - RNA, 22 nt, Artificial Sequence
  Synthesized RNAi sequence
ucuuccauauaggcagcucucc

SEQ ID NO: 14051 - RNA, 22 nt, Artificial Sequence
  Synthesized RNAi sequence
ucuuccgaaacgaaugaguaca

SEQ ID NO: 14052 - RNA, 22 nt, Artificial Sequence
  Synthesized RNAi sequence
ucuuucaaguccucccuaaugu

SEQ ID NO: 14053 - RNA, 22 nt, Artificial Sequence
  Synthesized RNAi sequence
ugaaaaugugguggcucuuuca

SEQ ID NO: 14054 - RNA, 22 nt, Artificial Sequence
  Synthesized RNAi sequence
ugaaaccagggacaaggcucuc

SEQ ID NO: 14055 - RNA, 22 nt, Artificial Sequence
  Synthesized RNAi sequence
ugacagccacacagauuuuaaa

SEQ ID NO: 14056 - RNA, 22 nt, Artificial Sequence
  Synthesized RNAi sequence
ugagugcacuaagcaugcagcc

SEQ ID NO: 14057 - RNA, 22 nt, Artificial Sequence
  Synthesized RNAi sequence
ugaucggcugcaacacggacga

SEQ ID NO: 14058 - RNA, 22 nt, Artificial Sequence
  Synthesized RNAi sequence
ugaugaucggcugcaacacgga

SEQ ID NO: 14059 - RNA, 22 nt, Artificial Sequence
  Synthesized RNAi sequence
ugaugauuccuaagaaaacaag

SEQ ID NO: 14060 - RNA, 22 nt, Artificial Sequence
  Synthesized RNAi sequence
ugcaacacggacgaaaccguaa

SEQ ID NO: 14061 - RNA, 22 nt, Artificial Sequence
  Synthesized RNAi sequence
ugcacuaagcaugcagccgagu

SEQ ID NO: 14062 - RNA, 22 nt, Artificial Sequence
  Synthesized RNAi sequence
ugcagaagauagacgaguuacu

SEQ ID NO: 14063 - RNA, 22 nt, Artificial Sequence
  Synthesized RNAi sequence
ugcgugagugcacuaagcaugc

SEQ ID NO: 14064 - RNA, 22 nt, Artificial Sequence
  Synthesized RNAi sequence
ugcugaugaucggcugcaacac

SEQ ID NO: 14065 - RNA, 22 nt, Artificial Sequence
  Synthesized RNAi sequence
uggaaucugccauggcuaaaau

SEQ ID NO: 14066 - RNA, 22 nt, Artificial Sequence
  Synthesized RNAi sequence
uggccucggugaaaauguggug

SEQ ID NO: 14067 - RNA, 22 nt, Artificial Sequence
  Synthesized RNAi sequence
uggggauagcacuacuaaaauu

SEQ ID NO: 14068 - RNA, 22 nt, Artificial Sequence
  Synthesized RNAi sequence
uguacacucgaucguacuccgc

SEQ ID NO: 14069 - RNA, 22 nt, Artificial Sequence
  Synthesized RNAi sequence
ugucaacgacaguaauuaguua

SEQ ID NO: 14070 - RNA, 22 nt, Artificial Sequence
  Synthesized RNAi sequence
uguccugucaacgacaguaauu

SEQ ID NO: 14071 - RNA, 22 nt, Artificial Sequence
  Synthesized RNAi sequence
ugucucuuccgaaacgaaugag

SEQ ID NO: 14072 - RNA, 22 nt, Artificial Sequence
  Synthesized RNAi sequence
ugugaugauuccuaagaaaaca

SEQ ID NO: 14073 - RNA, 22 nt, Artificial Sequence
  Synthesized RNAi sequence
ugugcugaugaucggcugcaac

SEQ ID NO: 14074 - RNA, 22 nt, Artificial Sequence
  Synthesized RNAi sequence
ugugguggcucuuucaaguccu

SEQ ID NO: 14075 - RNA, 22 nt, Artificial Sequence
  Synthesized RNAi sequence
uguucacuguacacucgaucgu

SEQ ID NO: 14076 - RNA, 22 nt, Artificial Sequence
  Synthesized RNAi sequence
uuaaaaucacauggggauagca

SEQ ID NO: 14077 - RNA, 22 nt, Artificial Sequence
  Synthesized RNAi sequence
uuaauuauacugcgugagugca

SEQ ID NO: 14078 - RNA, 22 nt, Artificial Sequence
  Synthesized RNAi sequence
uuaauuuuacacauuagggcuc

SEQ ID NO: 14079 - RNA, 22 nt, Artificial Sequence
  Synthesized RNAi sequence
uuacacauuagggcucuuccau

SEQ ID NO: 14080 - RNA, 22 nt, Artificial Sequence
  Synthesized RNAi sequence
uuaccuuucggucacacccgga

SEQ ID NO: 14081 - RNA, 22 nt, Artificial Sequence
  Synthesized RNAi sequence
uuacucguguccugucaacgac

SEQ ID NO: 14082 - RNA, 22 nt, Artificial Sequence
  Synthesized RNAi sequence
uuagggcucuuccauauaggca

SEQ ID NO: 14083 - RNA, 22 nt, Artificial Sequence
  Synthesized RNAi sequence
uuaguuauuaauuauacugcgu

SEQ ID NO: 14084 - RNA, 22 nt, Artificial Sequence
  Synthesized RNAi sequence
uuauacugcgugagugcacuaa

SEQ ID NO: 14085 - RNA, 22 nt, Artificial Sequence
  Synthesized RNAi sequence
uuauauagcccaucugccuugu

SEQ ID NO: 14086 - RNA, 22 nt, Artificial Sequence
  Synthesized RNAi sequence
uuauuaauuauacugcgugagu

SEQ ID NO: 14087 - RNA, 22 nt, Artificial Sequence
  Synthesized RNAi sequence
uucaaguccucccuaauguuac

SEQ ID NO: 14088 - RNA, 22 nt, Artificial Sequence
  Synthesized RNAi sequence
uucacuguacacucgaucguac

SEQ ID NO: 14089 - RNA, 22 nt, Artificial Sequence
  Synthesized RNAi sequence
uuccauauaggcagcucucccu

SEQ ID NO: 14090 - RNA, 22 nt, Artificial Sequence
  Synthesized RNAi sequence
uuccgaaacgaaugaguacaua

SEQ ID NO: 14091 - RNA, 22 nt, Artificial Sequence
  Synthesized RNAi sequence
uucgcugauuuugggguccauu

SEQ ID NO: 14092 - RNA, 22 nt, Artificial Sequence
  Synthesized RNAi sequence
uucggucacacccggacgaaac

SEQ ID NO: 14093 - RNA, 22 nt, Artificial Sequence
  Synthesized RNAi sequence
uucucguugaaaccagggacaa

SEQ ID NO: 14094 - RNA, 22 nt, Artificial Sequence
  Synthesized RNAi sequence
uugaaaccagggacaaggcucu

SEQ ID NO: 14095 - RNA, 22 nt, Artificial Sequence
  Synthesized RNAi sequence
uuggaaucugccauggcuaaaa

SEQ ID NO: 14096 - RNA, 22 nt, Artificial Sequence
  Synthesized RNAi sequence
uugugaugauuccuaagaaaac

SEQ ID NO: 14097 - RNA, 22 nt, Artificial Sequence
  Synthesized RNAi sequence
uuguucacuguacacucgaucg

SEQ ID NO: 14098 - RNA, 22 nt, Artificial Sequence
  Synthesized RNAi sequence
uuuacacauuagggcucuucca

SEQ ID NO: 14099 - RNA, 22 nt, Artificial Sequence
  Synthesized RNAi sequence
uuuauauagcccaucugccuug

SEQ ID NO: 14100 - RNA, 22 nt, Artificial Sequence
  Synthesized RNAi sequence
uuucaaguccucccuaauguua

SEQ ID NO: 14101 - RNA, 22 nt, Artificial Sequence
  Synthesized RNAi sequence
uuucgcugauuuugggguccau

SEQ ID NO: 14102 - RNA, 22 nt, Artificial Sequence
  Synthesized RNAi sequence
uuucggucacacccggacgaaa

SEQ ID NO: 14103 - RNA, 22 nt, Artificial Sequence
  Synthesized RNAi sequence
uuucucguugaaaccagggaca

SEQ ID NO: 14104 - RNA, 22 nt, Artificial Sequence
  Synthesized RNAi sequence
uuugggguccauuaucagacau

SEQ ID NO: 14105 - RNA, 22 nt, Artificial Sequence
  Synthesized RNAi sequence
uuuuacacauuagggcucuucc

SEQ ID NO: 14106 - RNA, 22 nt, Artificial Sequence
  Synthesized RNAi sequence
uuuucucguugaaaccagggac

SEQ ID NO: 14107 - RNA, 22 nt, Artificial Sequence
  Synthesized RNAi sequence
uuuugggguccauuaucagaca

SEQ ID NO: 14108 - RNA, 21 nt, Artificial Sequence
  Synthesized RNAi sequence
aaauuggcuacuaccgaagag

SEQ ID NO: 14109 - RNA, 21 nt, Artificial Sequence
  Synthesized RNAi sequence
aaccuaguaauagguuuccua

SEQ ID NO: 14110 - RNA, 21 nt, Artificial Sequence
  Synthesized RNAi sequence
aaggugacuauggugaugcug

SEQ ID NO: 14111 - RNA, 21 nt, Artificial Sequence
  Synthesized RNAi sequence
aauaauacugcgucuugguuc

SEQ ID NO: 14112 - RNA, 21 nt, Artificial Sequence
  Synthesized RNAi sequence
aauaguuaauagcguacuucu

SEQ ID NO: 14113 - RNA, 19 nt, Artificial Sequence
  Synthesized RNAi sequence
aucuguucucuaaacgaac

SEQ ID NO: 14114 - RNA, 21 nt, Artificial Sequence
  Synthesized RNAi sequence
auguacucauucguuucggaa

SEQ ID NO: 14115 - RNA, 20 nt, Artificial Sequence
  Synthesized RNAi sequence
augucugauaauggacccca

SEQ ID NO: 14116 - RNA, 21 nt, Artificial Sequence
  Synthesized RNAi sequence
augucugauaauggaccccaa

SEQ ID NO: 14117 - RNA, 20 nt, Artificial Sequence
  Synthesized RNAi sequence
caacgguacuauuaccguug

SEQ ID NO: 14118 - RNA, 24 nt, Artificial Sequence
  Synthesized RNAi sequence
cguagcuggugucucuaucuguag

SEQ ID NO: 14119 - RNA, 20 nt, Artificial Sequence
  Synthesized RNAi sequence
cguccgggugugaccgaaag

SEQ ID NO: 14120 - RNA, 21 nt, Artificial Sequence
  Synthesized RNAi sequence
cuguucucuaaacgaacuuua

SEQ ID NO: 14121 - RNA, 19 nt, Artificial Sequence
  Synthesized RNAi sequence
gaacaaacccaaggaaauu

SEQ ID NO: 14122 - RNA, 20 nt, Artificial Sequence
  Synthesized RNAi sequence
gaucuguucucuaaacgaac

SEQ ID NO: 14123 - RNA, 19 nt, Artificial Sequence
  Synthesized RNAi sequence
gaucuucuggucuaaacga

SEQ ID NO: 14124 - RNA, 18 nt, Artificial Sequence
  Synthesized RNAi sequence
gcaaauugcacaauuugc

SEQ ID NO: 14125 - RNA, 18 nt, Artificial Sequence
  Synthesized RNAi sequence
gcuucuuaggagaaugac

SEQ ID NO: 14126 - RNA, 23 nt, Artificial Sequence
  Synthesized RNAi sequence
guaagugacaacagauguuucau

SEQ ID NO: 14127 - RNA, 20 nt, Artificial Sequence
  Synthesized RNAi sequence
guguaagugcagcccgucuu

SEQ ID NO: 14128 - RNA, 21 nt, Artificial Sequence
  Synthesized RNAi sequence
guuccugaucuucuggucuaa

SEQ ID NO: 14129 - RNA, 19 nt, Artificial Sequence
  Synthesized RNAi sequence
guucucuaaacgaacuuua

SEQ ID NO: 14130 - RNA, 19 nt, Artificial Sequence
  Synthesized RNAi sequence
uaugacuaugucauauuca

SEQ ID NO: 14131 - RNA, 21 nt, Artificial Sequence
  Synthesized RNAi sequence
ucaaggaacaacauugccaaa

SEQ ID NO: 14132 - RNA, 21 nt, Artificial Sequence
  Synthesized RNAi sequence
uccccaugugauuuuaauagc

SEQ ID NO: 14133 - RNA, 19 nt, Artificial Sequence
  Synthesized RNAi sequence
uccugaucuucuggucuaa

SEQ ID NO: 14134 - RNA, 21 nt, Artificial Sequence
  Synthesized RNAi sequence
ugugcguacugcugcaauauu

SEQ ID NO: 14135 - RNA, 21 nt, Artificial Sequence
  Synthesized RNAi sequence
uuaauaguuaauagcguacuu

SEQ ID NO: 14136 - RNA, 21 nt, Artificial Sequence
  Synthesized RNAi sequence
uucgauugugugcguacugcu

SEQ ID NO: 14137 - RNA, 21 nt, Artificial Sequence
  Synthesized RNAi sequence
uuucgugguauucuugcuagu

SEQ ID NO: 14138 - RNA, 19 nt, Artificial Sequence
  Synthesized RNAi sequence
uuacucguguccugucaac

SEQ ID NO: 14139 - RNA, 19 nt, Artificial Sequence
  Synthesized RNAi sequence
uuauuaauuauacugcgug

SEQ ID NO: 14140 - RNA, 19 nt, Artificial Sequence
  Synthesized RNAi sequence
uucguuuagagaacagauc

SEQ ID NO: 14141 - RNA, 19 nt, Artificial Sequence
  Synthesized RNAi sequence
acuaucugcaucuacaacc

SEQ ID NO: 14142 - RNA, 19 nt, Artificial Sequence
  Synthesized RNAi sequence
aucaccauuagcaacagcc

SEQ ID NO: 14143 - RNA, 19 nt, Artificial Sequence
  Synthesized RNAi sequence
uaaacucugaggcuauagc

SEQ ID NO: 14144 - RNA, 19 nt, Artificial Sequence
  Synthesized RNAi sequence
uaaauuaggugaauugucc

SEQ ID NO: 14145 - RNA, 19 nt, Artificial Sequence
  Synthesized RNAi sequence
uaagaacaacuucagaauc

SEQ ID NO: 14146 - RNA, 19 nt, Artificial Sequence
  Synthesized RNAi sequence
uauacauuugggucauagc

SEQ ID NO: 14147 - RNA, 19 nt, Artificial Sequence
  Synthesized RNAi sequence
uugauaauguuguugagug

SEQ ID NO: 14148 - RNA, 19 nt, Artificial Sequence
  Synthesized RNAi sequence
uuuacuaucugcaucuaca

SEQ ID NO: 14149 - RNA, 19 nt, Artificial Sequence
  Synthesized RNAi sequence
aaagucaguaacauuaucg

SEQ ID NO: 14150 - RNA, 19 nt, Artificial Sequence
  Synthesized RNAi sequence
aauugcaaagaacacaagc

SEQ ID NO: 14151 - RNA, 19 nt, Artificial Sequence
  Synthesized RNAi sequence
auugcaaagaacacaagcc

SEQ ID NO: 14152 - RNA, 19 nt, Artificial Sequence
  Synthesized RNAi sequence
auuuguaaguuguuguacc

SEQ ID NO: 14153 - RNA, 19 nt, Artificial Sequence
  Synthesized RNAi sequence
uaaagucaguaacauuauc

SEQ ID NO: 14154 - RNA, 19 nt, Artificial Sequence
  Synthesized RNAi sequence
uaaugaagucugugaauug

SEQ ID NO: 14155 - RNA, 19 nt, Artificial Sequence
  Synthesized RNAi sequence
uaauucuaacauagugcuc

SEQ ID NO: 14156 - RNA, 19 nt, Artificial Sequence
  Synthesized RNAi sequence
uaauucuacuacauuuauc

SEQ ID NO: 14157 - RNA, 19 nt, Artificial Sequence
  Synthesized RNAi sequence
uaauucucugucagacagc

SEQ ID NO: 14158 - RNA, 19 nt, Artificial Sequence
  Synthesized RNAi sequence
uacaauaauagcucauacc

SEQ ID NO: 14159 - RNA, 19 nt, Artificial Sequence
  Synthesized RNAi sequence
uacuacauuuaucuauagg

SEQ ID NO: 14160 - RNA, 19 nt, Artificial Sequence
  Synthesized RNAi sequence
uuacaauaauagcucauac

SEQ ID NO: 14161 - RNA, 19 nt, Artificial Sequence
  Synthesized RNAi sequence
uuacauuacaagagugagc

SEQ ID NO: 14162 - RNA, 19 nt, Artificial Sequence
  Synthesized RNAi sequence
uuaguuagcaaugugcgug

SEQ ID NO: 14163 - RNA, 19 nt, Artificial Sequence
  Synthesized RNAi sequence
uucaagacuuguaaauugc

SEQ ID NO: 14164 - RNA, 19 nt, Artificial Sequence
  Synthesized RNAi sequence
uucuaacauagugcucuug

SEQ ID NO: 14165 - RNA, 19 nt, Artificial Sequence
  Synthesized RNAi sequence
uugauaauuugcaacauug

SEQ ID NO: 14166 - RNA, 19 nt, Artificial Sequence
  Synthesized RNAi sequence
uuuaguuacacgauaacca

SEQ ID NO: 14167 - RNA, 19 nt, Artificial Sequence
  Synthesized RNAi sequence
uuucaguacagguguuagc

SEQ ID NO: 14168 - RNA, 19 nt, Artificial Sequence
  Synthesized RNAi sequence
aucacauuuaggauaaucc

SEQ ID NO: 14169 - RNA, 19 nt, Artificial Sequence
  Synthesized RNAi sequence
aucuugauuaucuaauguc

SEQ ID NO: 14170 - RNA, 19 nt, Artificial Sequence
  Synthesized RNAi sequence
auuauguacaacaccuagc

SEQ ID NO: 14171 - RNA, 19 nt, Artificial Sequence
  Synthesized RNAi sequence
uaaacuuaaagaagucaug

SEQ ID NO: 14172 - RNA, 19 nt, Artificial Sequence
  Synthesized RNAi sequence
uaaagaagucauguuuagc

SEQ ID NO: 14173 - RNA, 19 nt, Artificial Sequence
  Synthesized RNAi sequence
uaaauugucaucuucgucc

SEQ ID NO: 14174 - RNA, 19 nt, Artificial Sequence
  Synthesized RNAi sequence
uaguacuacagauagagac

SEQ ID NO: 14175 - RNA, 19 nt, Artificial Sequence
  Synthesized RNAi sequence
uaucuaaugucaguacacc

SEQ ID NO: 14176 - RNA, 19 nt, Artificial Sequence
  Synthesized RNAi sequence
uauguacaacaccuagcuc

SEQ ID NO: 14177 - RNA, 19 nt, Artificial Sequence
  Synthesized RNAi sequence
uauugaaauaaucaucauc

SEQ ID NO: 14178 - RNA, 19 nt, Artificial Sequence
  Synthesized RNAi sequence
uuaacauauagugaaccgc

SEQ ID NO: 14179 - RNA, 19 nt, Artificial Sequence
  Synthesized RNAi sequence
uuaggauguuuaguaagug

SEQ ID NO: 14180 - RNA, 19 nt, Artificial Sequence
  Synthesized RNAi sequence
uuaucuaaugucaguacac

SEQ ID NO: 14181 - RNA, 19 nt, Artificial Sequence
  Synthesized RNAi sequence
uuauguacaacaccuagcu

SEQ ID NO: 14182 - RNA, 19 nt, Artificial Sequence
  Synthesized RNAi sequence
uucuacaucacuauaaaca

SEQ ID NO: 14183 - RNA, 19 nt, Artificial Sequence
  Synthesized RNAi sequence
uugaaacuacaaauggaac

SEQ ID NO: 14184 - RNA, 19 nt, Artificial Sequence
  Synthesized RNAi sequence
uuuaauucaacagaacuuc

SEQ ID NO: 14185 - RNA, 19 nt, Artificial Sequence
  Synthesized RNAi sequence
uuucuacaucacuauaaac

SEQ ID NO: 14186 - RNA, 19 nt, Artificial Sequence
  Synthesized RNAi sequence
uuucuuggaagcgacaaca

SEQ ID NO: 14187 - RNA, 19 nt, Artificial Sequence
  Synthesized RNAi sequence
auaauuauaaucagcaauc

SEQ ID NO: 14188 - RNA, 19 nt, Artificial Sequence
  Synthesized RNAi sequence
auauuuaucuaacuccucc

SEQ ID NO: 14189 - RNA, 19 nt, Artificial Sequence
  Synthesized RNAi sequence
uaaaguuugaaaccuagug

SEQ ID NO: 14190 - RNA, 19 nt, Artificial Sequence
  Synthesized RNAi sequence
uaacaagcguguuuaaagc

SEQ ID NO: 14191 - RNA, 19 nt, Artificial Sequence
  Synthesized RNAi sequence
uaacacacugacuagagac

SEQ ID NO: 14192 - RNA, 19 nt, Artificial Sequence
  Synthesized RNAi sequence
uaagauuaacacacugacu

SEQ ID NO: 14193 - RNA, 19 nt, Artificial Sequence
  Synthesized RNAi sequence
uaauauuaggaaaucuaac

SEQ ID NO: 14194 - RNA, 19 nt, Artificial Sequence
  Synthesized RNAi sequence
uaauuaauuguugagucac

SEQ ID NO: 14195 - RNA, 19 nt, Artificial Sequence
  Synthesized RNAi sequence
uaauuuaguaggagacacu

SEQ ID NO: 14196 - RNA, 19 nt, Artificial Sequence
  Synthesized RNAi sequence
uagacucaguaagaacacc

SEQ ID NO: 14197 - RNA, 19 nt, Artificial Sequence
  Synthesized RNAi sequence
uauauaggacagaauaauc

SEQ ID NO: 14198 - RNA, 19 nt, Artificial Sequence
  Synthesized RNAi sequence
uaucaaaccucuuaguacc

SEQ ID NO: 14199 - RNA, 19 nt, Artificial Sequence
  Synthesized RNAi sequence
uaucaauuugcacuucagc

SEQ ID NO: 14200 - RNA, 19 nt, Artificial Sequence
  Synthesized RNAi sequence
ucgaaucuaaaguaguacc

SEQ ID NO: 14201 - RNA, 19 nt, Artificial Sequence
  Synthesized RNAi sequence
uuaauuuaguaggagacac

SEQ ID NO: 14202 - RNA, 19 nt, Artificial Sequence
  Synthesized RNAi sequence
uuagacucaguaagaacac

SEQ ID NO: 14203 - RNA, 19 nt, Artificial Sequence
  Synthesized RNAi sequence
uuagucugagucugauaac

SEQ ID NO: 14204 - RNA, 19 nt, Artificial Sequence
  Synthesized RNAi sequence
uuaucaaaccucuuaguac

SEQ ID NO: 14205 - RNA, 19 nt, Artificial Sequence
  Synthesized RNAi sequence
uuauuagaguaagcaacug

SEQ ID NO: 14206 - RNA, 19 nt, Artificial Sequence
  Synthesized RNAi sequence
uuauuauguuagacuucuc

SEQ ID NO: 14207 - RNA, 19 nt, Artificial Sequence
  Synthesized RNAi sequence
uuguaagauuaacacacug

SEQ ID NO: 14208 - RNA, 19 nt, Artificial Sequence
  Synthesized RNAi sequence
uuuaucuaacuccuccuug

SEQ ID NO: 14209 - RNA, 19 nt, Artificial Sequence
  Synthesized RNAi sequence
uuuguaaauuuguuugacu

SEQ ID NO: 14210 - RNA, 19 nt, Artificial Sequence
  Synthesized RNAi sequence
caacuuucgaucucuugua

SEQ ID NO: 14211 - RNA, 19 nt, Artificial Sequence
  Synthesized RNAi sequence
cuuguagaucuguucucua

SEQ ID NO: 14212 - RNA, 19 nt, Artificial Sequence
  Synthesized RNAi sequence
gguaacaaaccaaccaacu

SEQ ID NO: 14213 - RNA, 19 nt, Artificial Sequence
  Synthesized RNAi sequence
guaacaaaccaaccaacuu

SEQ ID NO: 14214 - RNA, 19 nt, Artificial Sequence
  Synthesized RNAi sequence
uaacaaaccaaccaacuuu

SEQ ID NO: 14215 - RNA, 19 nt, Artificial Sequence
  Synthesized RNAi sequence
ucuuguagaucuguucucu

SEQ ID NO: 14216 - RNA, 19 nt, Artificial Sequence
  Synthesized RNAi sequence
uguagaucuguucucuaaa

SEQ ID NO: 14217 - RNA, 22 nt, Artificial Sequence
  Synthesized RNAi sequence
uaguuauuaauuauacugcgug

SEQ ID NO: 14218 - RNA, 22 nt, Artificial Sequence
  Synthesized RNAi sequence
uuaguuauuaauuauacugcgu

SEQ ID NO: 14219 - RNA, 22 nt, Artificial Sequence
  Synthesized RNAi sequence
uuugaugaacacauagggcugu

SEQ ID NO: 14220 - RNA, 22 nt, Artificial Sequence
  Synthesized RNAi sequence
uugaaaaucuucauaaggauca

SEQ ID NO: 14221 - RNA, 22 nt, Artificial Sequence
  Synthesized RNAi sequence
uucuugaaaaucuucauaagga

SEQ ID NO: 14222 - RNA, 22 nt, Artificial Sequence
  Synthesized RNAi sequence
uuaauuucaaaaggugucugca

SEQ ID NO: 14223 - RNA, 22 nt, Artificial Sequence
  Synthesized RNAi sequence
uuagucaaauucucagugccac

SEQ ID NO: 14224 - RNA, 22 nt, Artificial Sequence
  Synthesized RNAi sequence
uuaaguuuaaagucaccaacaa

SEQ ID NO: 14225 - RNA, 22 nt, Artificial Sequence
  Synthesized RNAi sequence
uucauuaaguuuaaagucacca

SEQ ID NO: 14226 - RNA, 22 nt, Artificial Sequence
  Synthesized RNAi sequence
uaacuuuaaaauuaccacagga

SEQ ID NO: 14227 - RNA, 22 nt, Artificial Sequence
  Synthesized RNAi sequence
uuuguaacuuuaaaauuaccac

SEQ ID NO: 14228 - RNA, 22 nt, Artificial Sequence
  Synthesized RNAi sequence
uaagaagauaauuucuuuuggg

SEQ ID NO: 14229 - RNA, 22 nt, Artificial Sequence
  Synthesized RNAi sequence
ucuguuaacacuucugugggaa

SEQ ID NO: 14230 - RNA, 22 nt, Artificial Sequence
  Synthesized RNAi sequence
uuucaagacaacuuccucuguu

SEQ ID NO: 14231 - RNA, 22 nt, Artificial Sequence
  Synthesized RNAi sequence
uucuaaugguuguaaaucacca

SEQ ID NO: 14232 - RNA, 22 nt, Artificial Sequence
  Synthesized RNAi sequence
uuuguuaccaucauauuaggug

SEQ ID NO: 14233 - RNA, 22 nt, Artificial Sequence
  Synthesized RNAi sequence
ucaaauaaguaguauguagcca

SEQ ID NO: 14234 - RNA, 22 nt, Artificial Sequence
  Synthesized RNAi sequence
uagaaagaacaauacauaugug

SEQ ID NO: 14235 - RNA, 22 nt, Artificial Sequence
  Synthesized RNAi sequence
uugguaaucaucuucaguacca

SEQ ID NO: 14236 - RNA, 22 nt, Artificial Sequence
  Synthesized RNAi sequence
uugacuaucaucaucuaaccaa

SEQ ID NO: 14237 - RNA, 22 nt, Artificial Sequence
  Synthesized RNAi sequence
uucaauagucugaacaacuggu

SEQ ID NO: 14238 - RNA, 22 nt, Artificial Sequence
  Synthesized RNAi sequence
uuaaaacacaacuaccacccac

SEQ ID NO: 14239 - RNA, 22 nt, Artificial Sequence
  Synthesized RNAi sequence
uuaagaaguugaaugucuucac

SEQ ID NO: 14240 - RNA, 22 nt, Artificial Sequence
  Synthesized RNAi sequence
uaaaauuuucauaagcacucuu

SEQ ID NO: 14241 - RNA, 22 nt, Artificial Sequence
  Synthesized RNAi sequence
uuaaaauuuucauaagcacucu

SEQ ID NO: 14242 - RNA, 22 nt, Artificial Sequence
  Synthesized RNAi sequence
uuucuuaucaucuuguuuucuc

SEQ ID NO: 14243 - RNA, 22 nt, Artificial Sequence
  Synthesized RNAi sequence
uugauuuucuuaucaucuuguu

SEQ ID NO: 14244 - RNA, 22 nt, Artificial Sequence
  Synthesized RNAi sequence
uuugauuuucuuaucaucuugu

SEQ ID NO: 14245 - RNA, 22 nt, Artificial Sequence
  Synthesized RNAi sequence
uaaaguaacaaguuuucuguga

SEQ ID NO: 14246 - RNA, 22 nt, Artificial Sequence
  Synthesized RNAi sequence
uucuuuaagaaagugaugucaa

SEQ ID NO: 14247 - RNA, 22 nt, Artificial Sequence
  Synthesized RNAi sequence
uuucuuuaagaaagugauguca

SEQ ID NO: 14248 - RNA, 22 nt, Artificial Sequence
  Synthesized RNAi sequence
uauaguugaaacuauggcuuua

SEQ ID NO: 14249 - RNA, 22 nt, Artificial Sequence
  Synthesized RNAi sequence
uuauauuuacgcuguauaguug

SEQ ID NO: 14250 - RNA, 22 nt, Artificial Sequence
  Synthesized RNAi sequence
uaagauaaccauuauacgcugu

SEQ ID NO: 14251 - RNA, 22 nt, Artificial Sequence
  Synthesized RNAi sequence
uucaauaaaauguucuucaggu

SEQ ID NO: 14252 - RNA, 22 nt, Artificial Sequence
  Synthesized RNAi sequence
uuucaauaaaauguucuucagg

SEQ ID NO: 14253 - RNA, 22 nt, Artificial Sequence
  Synthesized RNAi sequence
uaagaaauucuauaccuaguug

SEQ ID NO: 14254 - RNA, 22 nt, Artificial Sequence
  Synthesized RNAi sequence
uuaagaaauucuauaccuaguu

SEQ ID NO: 14255 - RNA, 22 nt, Artificial Sequence
  Synthesized RNAi sequence
uauuuuaguaacaucagcucca

SEQ ID NO: 14256 - RNA, 22 nt, Artificial Sequence
  Synthesized RNAi sequence
uuuauuuuaguaacaucagcuc

SEQ ID NO: 14257 - RNA, 22 nt, Artificial Sequence
  Synthesized RNAi sequence
uuuuauuuuaguaacaucagcu

SEQ ID NO: 14258 - RNA, 22 nt, Artificial Sequence
  Synthesized RNAi sequence
uuaaauuguucauaagaaagug

SEQ ID NO: 14259 - RNA, 22 nt, Artificial Sequence
  Synthesized RNAi sequence
uuaaguucauacugagcaggug

SEQ ID NO: 14260 - RNA, 22 nt, Artificial Sequence
  Synthesized RNAi sequence
uucuuuguagaaaacauccgua

SEQ ID NO: 14261 - RNA, 22 nt, Artificial Sequence
  Synthesized RNAi sequence
uuucuuuguagaaaacauccgu

SEQ ID NO: 14262 - RNA, 22 nt, Artificial Sequence
  Synthesized RNAi sequence
uuaaaauuaucgaagcuugcgu

SEQ ID NO: 14263 - RNA, 22 nt, Artificial Sequence
  Synthesized RNAi sequence
uuuauaaucaauagccaccaca

SEQ ID NO: 14264 - RNA, 22 nt, Artificial Sequence
  Synthesized RNAi sequence
uuauguaacaauuuagcuccuu

SEQ ID NO: 14265 - RNA, 22 nt, Artificial Sequence
  Synthesized RNAi sequence
uuaaguauaaugucuccuacaa

SEQ ID NO: 14266 - RNA, 22 nt, Artificial Sequence
  Synthesized RNAi sequence
uuucuuaauaguaagacuagaa

SEQ ID NO: 14267 - RNA, 22 nt, Artificial Sequence
  Synthesized RNAi sequence
uuagguuucuuaauaguaagac

SEQ ID NO: 14268 - RNA, 22 nt, Artificial Sequence
  Synthesized RNAi sequence
uauaauuaguacaaacacgguu

SEQ ID NO: 14269 - RNA, 22 nt, Artificial Sequence
  Synthesized RNAi sequence
uuaauucuagaauuuguacuuc

SEQ ID NO: 14270 - RNA, 22 nt, Artificial Sequence
  Synthesized RNAi sequence
uuuaauucuagaauuuguacuu

SEQ ID NO: 14271 - RNA, 22 nt, Artificial Sequence
  Synthesized RNAi sequence
uaaauuagacauuaaaacaccu

SEQ ID NO: 14272 - RNA, 22 nt, Artificial Sequence
  Synthesized RNAi sequence
uuguauaguuucuaaagaagga

SEQ ID NO: 14273 - RNA, 22 nt, Artificial Sequence
  Synthesized RNAi sequence
uaacaauaguuguacauucgac

SEQ ID NO: 14274 - RNA, 22 nt, Artificial Sequence
  Synthesized RNAi sequence
uuaacaauaguuguacauucga

SEQ ID NO: 14275 - RNA, 22 nt, Artificial Sequence
  Synthesized RNAi sequence
ucacuaauaaauguacuaccag

SEQ ID NO: 14276 - RNA, 22 nt, Artificial Sequence
  Synthesized RNAi sequence
uucaucacuaauaaauguacua

SEQ ID NO: 14277 - RNA, 22 nt, Artificial Sequence
  Synthesized RNAi sequence
uaucaaaguaaagauggaugga

SEQ ID NO: 14278 - RNA, 22 nt, Artificial Sequence
  Synthesized RNAi sequence
uaaguuaacaaaaugagagaga

SEQ ID NO: 14279 - RNA, 22 nt, Artificial Sequence
  Synthesized RNAi sequence
uagauaagacauugucuaagga

SEQ ID NO: 14280 - RNA, 22 nt, Artificial Sequence
  Synthesized RNAi sequence
uucuaugucagauugaugugac

SEQ ID NO: 14281 - RNA, 22 nt, Artificial Sequence
  Synthesized RNAi sequence
uaguuauuacaacuaucgccag

SEQ ID NO: 14282 - RNA, 22 nt, Artificial Sequence
  Synthesized RNAi sequence
auaguuauuacaacuaucgcca

SEQ ID NO: 14283 - RNA, 22 nt, Artificial Sequence
  Synthesized RNAi sequence
uauaguuauuacaacuaucgcc

SEQ ID NO: 14284 - RNA, 22 nt, Artificial Sequence
  Synthesized RNAi sequence
uuauuaacaauuuuaccacccu

SEQ ID NO: 14285 - RNA, 22 nt, Artificial Sequence
  Synthesized RNAi sequence
uuuaauuaacugcuucaaccaa

SEQ ID NO: 14286 - RNA, 22 nt, Artificial Sequence
  Synthesized RNAi sequence
uuagacaugacaugaacaggug

SEQ ID NO: 14287 - RNA, 22 nt, Artificial Sequence
  Synthesized RNAi sequence
uuagcaaaacaaguaucuguag

SEQ ID NO: 14288 - RNA, 22 nt, Artificial Sequence
  Synthesized RNAi sequence
uugucauuaguauaacuaccac

SEQ ID NO: 14289 - RNA, 22 nt, Artificial Sequence
  Synthesized RNAi sequence
uuugucauuaguauaacuacca

SEQ ID NO: 14290 - RNA, 22 nt, Artificial Sequence
  Synthesized RNAi sequence
uaaauuuacagcaucuacacca

SEQ ID NO: 14291 - RNA, 22 nt, Artificial Sequence
  Synthesized RNAi sequence
uuaguaaguaaauuuacagcau

SEQ ID NO: 14292 - RNA, 22 nt, Artificial Sequence
  Synthesized RNAi sequence
uaaauaacagaauaaacaccag

SEQ ID NO: 14293 - RNA, 22 nt, Artificial Sequence
  Synthesized RNAi sequence
uagguaauuacuaaagaaccaa

SEQ ID NO: 14294 - RNA, 22 nt, Artificial Sequence
  Synthesized RNAi sequence
uuagguaauuacuaaagaacca

SEQ ID NO: 14295 - RNA, 22 nt, Artificial Sequence
  Synthesized RNAi sequence
uaaguaucuauuauauugcgua

SEQ ID NO: 14296 - RNA, 22 nt, Artificial Sequence
  Synthesized RNAi sequence
uuauaaagagcuaaguaucuau

SEQ ID NO: 14297 - RNA, 22 nt, Artificial Sequence
  Synthesized RNAi sequence
auuauaaagagcuaaguaucua

SEQ ID NO: 14298 - RNA, 22 nt, Artificial Sequence
  Synthesized RNAi sequence
uaaaucuucauaauuaggguua

SEQ ID NO: 14299 - RNA, 22 nt, Artificial Sequence
  Synthesized RNAi sequence
uaugauuagacuuacgaaugag

SEQ ID NO: 14300 - RNA, 22 nt, Artificial Sequence
  Synthesized RNAi sequence
uauguuaaaaccaacacuacca

SEQ ID NO: 14301 - RNA, 22 nt, Artificial Sequence
  Synthesized RNAi sequence
uuaacuguaauaguuguguccg

SEQ ID NO: 14302 - RNA, 22 nt, Artificial Sequence
  Synthesized RNAi sequence
ucauaauuguacuucauagcca

SEQ ID NO: 14303 - RNA, 22 nt, Artificial Sequence
  Synthesized RNAi sequence
uaguaugucaacauggucuugu

SEQ ID NO: 14304 - RNA, 22 nt, Artificial Sequence
  Synthesized RNAi sequence
uuuaaugaagcacacauaucua

SEQ ID NO: 14305 - RNA, 22 nt, Artificial Sequence
  Synthesized RNAi sequence
uuauguuugacaaacaucauug

SEQ ID NO: 14306 - RNA, 22 nt, Artificial Sequence
  Synthesized RNAi sequence
uuaaaauaagcuacaguggcaa

SEQ ID NO: 14307 - RNA, 22 nt, Artificial Sequence
  Synthesized RNAi sequence
uaaacuagcauuauacacugaa

SEQ ID NO: 14308 - RNA, 22 nt, Artificial Sequence
  Synthesized RNAi sequence
uaaguaaucauaaacaccaaga

SEQ ID NO: 14309 - RNA, 22 nt, Artificial Sequence
  Synthesized RNAi sequence
uuagaugaugauucuacucuga

SEQ ID NO: 14310 - RNA, 22 nt, Artificial Sequence
  Synthesized RNAi sequence
uuuagaugaugauucuacucug

SEQ ID NO: 14311 - RNA, 22 nt, Artificial Sequence
  Synthesized RNAi sequence
uugaacaauuuuacuaucugca

SEQ ID NO: 14312 - RNA, 22 nt, Artificial Sequence
  Synthesized RNAi sequence
uuauucuguaauuugacagcag

SEQ ID NO: 14313 - RNA, 22 nt, Artificial Sequence
  Synthesized RNAi sequence
uaaaguauaaauacuucacuuu

SEQ ID NO: 14314 - RNA, 22 nt, Artificial Sequence
  Synthesized RNAi sequence
uacuuuaucauuguagauguca

SEQ ID NO: 14315 - RNA, 22 nt, Artificial Sequence
  Synthesized RNAi sequence
uaaauugucaucuucguccuuu

SEQ ID NO: 14316 - RNA, 22 nt, Artificial Sequence
  Synthesized RNAi sequence
uuaaauugucaucuucguccuu

SEQ ID NO: 14317 - RNA, 22 nt, Artificial Sequence
  Synthesized RNAi sequence
aucaauuaaauugucaucuucg

SEQ ID NO: 14318 - RNA, 22 nt, Artificial Sequence
  Synthesized RNAi sequence
uuaacuacaaaguaagaaucaa

SEQ ID NO: 14319 - RNA, 22 nt, Artificial Sequence
  Synthesized RNAi sequence
uuuaguaagacguugacgugau

SEQ ID NO: 14320 - RNA, 22 nt, Artificial Sequence
  Synthesized RNAi sequence
uugauuaucuaaugucaguaca

SEQ ID NO: 14321 - RNA, 22 nt, Artificial Sequence
  Synthesized RNAi sequence
ucuugauuaucuaaugucagua

SEQ ID NO: 14322 - RNA, 22 nt, Artificial Sequence
  Synthesized RNAi sequence
uaauaagaaucuacaacaggaa

SEQ ID NO: 14323 - RNA, 22 nt, Artificial Sequence
  Synthesized RNAi sequence
auaauaagaaucuacaacagga

SEQ ID NO: 14324 - RNA, 22 nt, Artificial Sequence
  Synthesized RNAi sequence
uuaucuaguaauagauuaccag

SEQ ID NO: 14325 - RNA, 22 nt, Artificial Sequence
  Synthesized RNAi sequence
uuuaucuaguaauagauuacca

SEQ ID NO: 14326 - RNA, 22 nt, Artificial Sequence
  Synthesized RNAi sequence
uugaaaagcaacauuguuagua

SEQ ID NO: 14327 - RNA, 22 nt, Artificial Sequence
  Synthesized RNAi sequence
uuaauucaacagaacuuccuuc

SEQ ID NO: 14328 - RNA, 22 nt, Artificial Sequence
  Synthesized RNAi sequence
uuuaauucaacagaacuuccuu

SEQ ID NO: 14329 - RNA, 22 nt, Artificial Sequence
  Synthesized RNAi sequence
uagauuauaacgauaguaguca

SEQ ID NO: 14330 - RNA, 22 nt, Artificial Sequence
  Synthesized RNAi sequence
uuaucaacaacuucaacuacaa

SEQ ID NO: 14331 - RNA, 22 nt, Artificial Sequence
  Synthesized RNAi sequence
uaacaaucaaaguacuuaucaa

SEQ ID NO: 14332 - RNA, 22 nt, Artificial Sequence
  Synthesized RNAi sequence
uugguuagcauuaauacagcca

SEQ ID NO: 14333 - RNA, 22 nt, Artificial Sequence
  Synthesized RNAi sequence
uucauuugaguuauaguaggga

SEQ ID NO: 14334 - RNA, 22 nt, Artificial Sequence
  Synthesized RNAi sequence
uuaagauucauuugaguuauag

SEQ ID NO: 14335 - RNA, 22 nt, Artificial Sequence
  Synthesized RNAi sequence
uaaucuauagaaacggugugac

SEQ ID NO: 14336 - RNA, 22 nt, Artificial Sequence
  Synthesized RNAi sequence
uuaacauauagugaaccgccac

SEQ ID NO: 14337 - RNA, 22 nt, Artificial Sequence
  Synthesized RNAi sequence
uuuaacauauagugaaccgcca

SEQ ID NO: 14338 - RNA, 22 nt, Artificial Sequence
  Synthesized RNAi sequence
uuaaaguucuuuaugcuagcca

SEQ ID NO: 14339 - RNA, 22 nt, Artificial Sequence
  Synthesized RNAi sequence
uuaacuagcauuguauguugag

SEQ ID NO: 14340 - RNA, 22 nt, Artificial Sequence
  Synthesized RNAi sequence
uaagcauaacagaauacauguc

SEQ ID NO: 14341 - RNA, 22 nt, Artificial Sequence
  Synthesized RNAi sequence
uuacaauaauagcucauaccuc

SEQ ID NO: 14342 - RNA, 22 nt, Artificial Sequence
  Synthesized RNAi sequence
uuagcuaaaauguaaucaccag

SEQ ID NO: 14343 - RNA, 22 nt, Artificial Sequence
  Synthesized RNAi sequence
uuaauuuguaaguuguuguacc

SEQ ID NO: 14344 - RNA, 22 nt, Artificial Sequence
  Synthesized RNAi sequence
uuuaauuuguaaguuguuguac

SEQ ID NO: 14345 - RNA, 22 nt, Artificial Sequence
  Synthesized RNAi sequence
uugauaauuugcaacauugcua

SEQ ID NO: 14346 - RNA, 22 nt, Artificial Sequence
  Synthesized RNAi sequence
uauaauucuacuacauuuaucu

SEQ ID NO: 14347 - RNA, 22 nt, Artificial Sequence
  Synthesized RNAi sequence
uacaguacaaaagacauacugu

SEQ ID NO: 14348 - RNA, 22 nt, Artificial Sequence
  Synthesized RNAi sequence
ucaucaaagacaacuauaucug

SEQ ID NO: 14349 - RNA, 22 nt, Artificial Sequence
  Synthesized RNAi sequence
uuucauaagucuacacacugaa

SEQ ID NO: 14350 - RNA, 22 nt, Artificial Sequence
  Synthesized RNAi sequence
uuuucauaagucuacacacuga

SEQ ID NO: 14351 - RNA, 22 nt, Artificial Sequence
  Synthesized RNAi sequence
uauaguuuucauaagucuacac

SEQ ID NO: 14352 - RNA, 22 nt, Artificial Sequence
  Synthesized RNAi sequence
uuaucauaaaccaaagcacuca

SEQ ID NO: 14353 - RNA, 22 nt, Artificial Sequence
  Synthesized RNAi sequence
uuacauuacaagagugagcugu

SEQ ID NO: 14354 - RNA, 22 nt, Artificial Sequence
  Synthesized RNAi sequence
uugaauuuagugucaacacuga

SEQ ID NO: 14355 - RNA, 22 nt, Artificial Sequence
  Synthesized RNAi sequence
uuugaauuuagugucaacacug

SEQ ID NO: 14356 - RNA, 22 nt, Artificial Sequence
  Synthesized RNAi sequence
uugacaauacagaucaugguug

SEQ ID NO: 14357 - RNA, 22 nt, Artificial Sequence
  Synthesized RNAi sequence
uuaaucuucaguucaucaccaa

SEQ ID NO: 14358 - RNA, 22 nt, Artificial Sequence
  Synthesized RNAi sequence
uauuuuauaagcuuugucacua

SEQ ID NO: 14359 - RNA, 22 nt, Artificial Sequence
  Synthesized RNAi sequence
uaagaauagaauaauucuucua

SEQ ID NO: 14360 - RNA, 22 nt, Artificial Sequence
  Synthesized RNAi sequence
uuagauagcacucuagugucaa

SEQ ID NO: 14361 - RNA, 22 nt, Artificial Sequence
  Synthesized RNAi sequence
uuuacauacaaacugccaccau

SEQ ID NO: 14362 - RNA, 22 nt, Artificial Sequence
  Synthesized RNAi sequence
uuauuuacauacaaacugccac

SEQ ID NO: 14363 - RNA, 22 nt, Artificial Sequence
  Synthesized RNAi sequence
uuuauuuacauacaaacugcca

SEQ ID NO: 14364 - RNA, 22 nt, Artificial Sequence
  Synthesized RNAi sequence
uuuaaauuaacaaaagcacuuu

SEQ ID NO: 14365 - RNA, 22 nt, Artificial Sequence
  Synthesized RNAi sequence
uaaucuauaucugacacuacuu

SEQ ID NO: 14366 - RNA, 22 nt, Artificial Sequence
  Synthesized RNAi sequence
uauaaguaucaaauuguuugua

SEQ ID NO: 14367 - RNA, 22 nt, Artificial Sequence
  Synthesized RNAi sequence
uuucuaaacucugaagucuugu

SEQ ID NO: 14368 - RNA, 22 nt, Artificial Sequence
  Synthesized RNAi sequence
uaaugauagaaacugguacuuc

SEQ ID NO: 14369 - RNA, 22 nt, Artificial Sequence
  Synthesized RNAi sequence
uauuaaugauagaaacugguac

SEQ ID NO: 14370 - RNA, 22 nt, Artificial Sequence
  Synthesized RNAi sequence
uuauuaaugauagaaacuggua

SEQ ID NO: 14371 - RNA, 22 nt, Artificial Sequence
  Synthesized RNAi sequence
uuuucaaacaauucuacaucaa

SEQ ID NO: 14372 - RNA, 22 nt, Artificial Sequence
  Synthesized RNAi sequence
uuauuuucaaacaauucuacau

SEQ ID NO: 14373 - RNA, 22 nt, Artificial Sequence
  Synthesized RNAi sequence
uuuauuuucaaacaauucuaca

SEQ ID NO: 14374 - RNA, 22 nt, Artificial Sequence
  Synthesized RNAi sequence
uuuuauuuucaaacaauucuac

SEQ ID NO: 14375 - RNA, 22 nt, Artificial Sequence
  Synthesized RNAi sequence
ucaaaugcuacauuaacaggua

SEQ ID NO: 14376 - RNA, 22 nt, Artificial Sequence
  Synthesized RNAi sequence
uuauugaguauuuucaccucug

SEQ ID NO: 14377 - RNA, 22 nt, Artificial Sequence
  Synthesized RNAi sequence
uucuguaauaagaacaccauua

SEQ ID NO: 14378 - RNA, 22 nt, Artificial Sequence
  Synthesized RNAi sequence
uuaaauucuuguaaauuucuac

SEQ ID NO: 14379 - RNA, 22 nt, Artificial Sequence
  Synthesized RNAi sequence
ucaauuuccauuugacuccugg

SEQ ID NO: 14380 - RNA, 22 nt, Artificial Sequence
  Synthesized RNAi sequence
uaagaaaucaauuuccauuuga

SEQ ID NO: 14381 - RNA, 22 nt, Artificial Sequence
  Synthesized RNAi sequence
uaauaaaucaauaacagaacac

SEQ ID NO: 14382 - RNA, 22 nt, Artificial Sequence
  Synthesized RNAi sequence
uauuauuucaacaaaaucauca

SEQ ID NO: 14383 - RNA, 22 nt, Artificial Sequence
  Synthesized RNAi sequence
uuuauuagcuguauguacaguu

SEQ ID NO: 14384 - RNA, 22 nt, Artificial Sequence
  Synthesized RNAi sequence
uuuaaagacauaacagcaguac

SEQ ID NO: 14385 - RNA, 22 nt, Artificial Sequence
  Synthesized RNAi sequence
uuuuaaagacauaacagcagua

SEQ ID NO: 14386 - RNA, 22 nt, Artificial Sequence
  Synthesized RNAi sequence
uuguuaacaagaacaucacuag

SEQ ID NO: 14387 - RNA, 22 nt, Artificial Sequence
  Synthesized RNAi sequence
uuaguuguuaacaagaacauca

SEQ ID NO: 14388 - RNA, 22 nt, Artificial Sequence
  Synthesized RNAi sequence
uaagauuaacacacugacuaga

SEQ ID NO: 14389 - RNA, 22 nt, Artificial Sequence
  Synthesized RNAi sequence
uuaucaaaccucuuaguaccau

SEQ ID NO: 14390 - RNA, 22 nt, Artificial Sequence
  Synthesized RNAi sequence
uuauguuagacuucucagugga

SEQ ID NO: 14391 - RNA, 22 nt, Artificial Sequence
  Synthesized RNAi sequence
uuaacaauaaguagggacuggg

SEQ ID NO: 14392 - RNA, 22 nt, Artificial Sequence
  Synthesized RNAi sequence
uuaauaacaacauuaguagcgu

SEQ ID NO: 14393 - RNA, 22 nt, Artificial Sequence
  Synthesized RNAi sequence
uuuaauaacaacauuaguagcg

SEQ ID NO: 14394 - RNA, 22 nt, Artificial Sequence
  Synthesized RNAi sequence
uuuaauagaaaaguccuagguu

SEQ ID NO: 14395 - RNA, 22 nt, Artificial Sequence
  Synthesized RNAi sequence
uaacaauagauucuguugguug

SEQ ID NO: 14396 - RNA, 22 nt, Artificial Sequence
  Synthesized RNAi sequence
ucuaauuacaaaugaaucugca

SEQ ID NO: 14397 - RNA, 22 nt, Artificial Sequence
  Synthesized RNAi sequence
uucaguugaaauaucucucuca

SEQ ID NO: 14398 - RNA, 22 nt, Artificial Sequence
  Synthesized RNAi sequence
ucaagaaucucaagugucugug

SEQ ID NO: 14399 - RNA, 22 nt, Artificial Sequence
  Synthesized RNAi sequence
uaauaguaaaauuuguggguau

SEQ ID NO: 14400 - RNA, 22 nt, Artificial Sequence
  Synthesized RNAi sequence
uuuguugaaaaguagaucuuca

SEQ ID NO: 14401 - RNA, 22 nt, Artificial Sequence
  Synthesized RNAi sequence
ugagcaaucauuucaucuguga

SEQ ID NO: 14402 - RNA, 22 nt, Artificial Sequence
  Synthesized RNAi sequence
uugagcaaucauuucaucugug

SEQ ID NO: 14403 - RNA, 22 nt, Artificial Sequence
  Synthesized RNAi sequence
uccuauuacaacaucacaguua

SEQ ID NO: 14404 - RNA, 22 nt, Artificial Sequence
  Synthesized RNAi sequence
uaaaucaacaucuggugaugua

SEQ ID NO: 14405 - RNA, 22 nt, Artificial Sequence
  Synthesized RNAi sequence
uuuauuguagaugaagaaggua

SEQ ID NO: 14406 - RNA, 22 nt, Artificial Sequence
  Synthesized RNAi sequence
uuuguaauaagaaagcguucgu

SEQ ID NO: 14407 - RNA, 22 nt, Artificial Sequence
  Synthesized RNAi sequence
auaauuaguaauaucucugcua

SEQ ID NO: 14408 - RNA, 22 nt, Artificial Sequence
  Synthesized RNAi sequence
uaauaauuaguaauaucucugc

SEQ ID NO: 14409 - RNA, 22 nt, Artificial Sequence
  Synthesized RNAi sequence
uuaaaaguacuguuguaccucu

SEQ ID NO: 14410 - RNA, 22 nt, Artificial Sequence
  Synthesized RNAi sequence
uuuaaaaguacuguuguaccuc

SEQ ID NO: 14411 - RNA, 22 nt, Artificial Sequence
  Synthesized RNAi sequence
uucuuuuaaaaguacuguugua

SEQ ID NO: 14412 - RNA, 22 nt, Artificial Sequence
  Synthesized RNAi sequence
uuuguuaucagcuagaggauga

SEQ ID NO: 14413 - RNA, 22 nt, Artificial Sequence
  Synthesized RNAi sequence
uuaggugaaacugaucuggcac

SEQ ID NO: 14414 - RNA, 22 nt, Artificial Sequence
  Synthesized RNAi sequence
uuagaauagaagugaauaggac

SEQ ID NO: 14415 - RNA, 22 nt, Artificial Sequence
  Synthesized RNAi sequence
uuuagaauagaagugaauagga

SEQ ID NO: 14416 - RNA, 22 nt, Artificial Sequence
  Synthesized RNAi sequence
uauaauuaccgauaucgaugua

SEQ ID NO: 14417 - RNA, 22 nt, Artificial Sequence
  Synthesized RNAi sequence
uaauuguaaaagguaaacagga

SEQ ID NO: 14418 - RNA, 22 nt, Artificial Sequence
  Synthesized RNAi sequence
uuagaugaaaucuaaaacaaca

SEQ ID NO: 14419 - RNA, 22 nt, Artificial Sequence
  Synthesized RNAi sequence
uuaucagacauuuuaguuuguu

SEQ ID NO: 14420 - RNA, 22 nt, Artificial Sequence
  Synthesized RNAi sequence
uugaauuucuugaacuguugcg

SEQ ID NO: 14421 - RNA, 22 nt, Artificial Sequence
  Synthesized RNAi sequence
uuauucagcaaaaugacuugau

SEQ ID NO: 14422 - RNA, 22 nt, Artificial Sequence
  Synthesized RNAi sequence
uuaacuacaucuacuugugcua

SEQ ID NO: 14423 - RNA, 22 nt, Artificial Sequence
  Synthesized RNAi sequence
uaaaguuaacuacaucuacuug

SEQ ID NO: 14424 - RNA, 22 nt, Artificial Sequence
  Synthesized RNAi sequence
uuaaaguuaacuacaucuacuu

SEQ ID NO: 14425 - RNA, 22 nt, Artificial Sequence
  Synthesized RNAi sequence
uuaauuuuacacauuagggcuc

SEQ ID NO: 14426 - RNA, 23 nt, Artificial Sequence
  Synthesized RNAi sequence
ucugacauuuuagacuguacagc

SEQ ID NO: 14427 - RNA, 24 nt, Artificial Sequence
  Synthesized RNAi sequence
ucugacauuuuagacuguacagca

SEQ ID NO: 14428 - RNA, 25 nt, Artificial Sequence
  Synthesized RNAi sequence
ucugacauuuuagacuguacagcag
